(19) United States
(12) Patent Application Publication
(10) Pub. No.: US 2015/0284455 A1
(43) Pub. Date: Oct. 8, 2015

(54) COMPOSITIONS AND METHODS FOR MODULATING CELL SIGNALING

(71) Applicants: Scholar Rock, Inc., Cambridge, MA (US); CHILDREN'S MEDICAL CENTER CORPORATION, Boston, MA (US)

(72) Inventors: Timothy Alan Springer, Newton, MA (US); Leonard Ira Zon, Wellesley, MA (US); Nagesh K. Mahanthappa, Cambridge, MA (US)

(21) Appl. No.: 14/439,284

(22) PCT Filed: Nov. 6, 2013
(86) PCT No.: PCT/US13/68613

§ 371 Date: Apr. 29, 2015

Related U.S. Application Data
(60) Provisional application No. 61/722,969, filed on Nov. 6, 2012.
(60) Provisional application No. 61/722,919, filed on Nov. 6, 2012.

(51) Int. Cl. C07K 16/22; C07K 14/495; C07K 14/475

(52) U.S. Cl. CPC C07K 16/22; C07K 14/475; C07K 14/495; C07K 2317/76; C07K 2317/75

(57) ABSTRACT

The present invention provides growth factor-directed agents (GDAs), which act as either antagonists or agonists of cell signaling, particularly in the TGF-beta and related extracellular matrix signaling pathways. Such GDAs include monoclonal antibodies, fusion proteins and novel polypeptide compositions and/or conjugates of these compositions.

### CROSS REFERENCE TO RELATED APPLICATIONS

[0001] This application claims priority to U.S. Provisional Patent Application No. 61/722,919 filed Nov. 6, 2012, entitled Compositions and Methods for Modulating Cell Signaling and U.S. Provisional Patent Application No. 61/722,969 filed Nov. 6, 2012, entitled Compositions and Methods for Modulating Cell Signaling, the contents of each of which are herein incorporated by reference in their entireties.

### SEQUENCE LISTING

[0002] The instant application contains a Sequence Listing which has been submitted electronically in ASCII format and is hereby incorporated by reference in its entirety. Said ASCII copy, created on Oct. 30, 2013, is named 20351000PCT_SL.txt and is 1,425,051 bytes in size.

### FIELD OF THE INVENTION

[0003] The present invention provides growth factor-directed agents (GDAs), which act as either antagonists or agonists of cell signaling, particularly in the TGF-beta and related extracellular matrix signaling pathways. Such GDAs may comprise antibodies, fusion proteins, polypeptides, nucleic acids and/or small molecule compositions and/or conjugates thereof.

[0004] Further provided are methods, kits and assays for exploiting the provided GDAs. Also provided are novel antigens useful, for example in the design, development, production, generation, manufacture and/or discovery of antibody based GDAs.

### BACKGROUND OF THE INVENTION

[0005] Growth factors are cell signaling molecules that stimulate a variety of cellular activities. Due to their broad-reaching influence within biological systems, growth factor signaling is tightly regulated, often through interactions with other biomolecules, the extracellular and/or cellular matrix or withing a particular cell environment or niche. These interactions may be direct or indirect.

[0006] Growth factors of the transforming growth factor beta (TGF-beta) family are involved in a variety of cellular processes. Almost all signaling in the TGF-beta family goes through a common pathway whereby a dimeric ligand is recognized by a heterotetrameric receptor complex containing two type I and two type II receptors. Each receptor has a serine-threonine kinase domain. Type II receptors phosphorylate type I receptors, which in turn phosphorylate receptor-regulated Smads that translocate to and accumulate in the nucleus and regulate transcription.

[0007] There are 33 different members of the TGF-beta family in humans. Members include the bone morphogenetic proteins (BMP), inhibin, activin, growth and differentiation factor (GDF), myostatin, nodal, anti-Mullerian hormone, and lefty proteins. Each member of the family has a prodomain of 200 to 450 residues and a C-terminal mature growth factor domain of about 110 residues (See FIG. 1).

[0008] The prodomain and mature growth factor domains are synthesized as a single polypeptide chain. The prodomains guide proper folding and dimerization of the C-terminal growth factor domains. The prodomains have very recently been recognized to have important functions in directing the growth factor (after secretion) to specific locations in the extracellular matrix and cellular matrix (ECCM), until other signals are received that cause release of the growth factor from latency. Release from latency occurs in a highly localized environment whereby most family members act over a distance of only a few cell diameters, and once they reach the circulation are rapidly cleared. Most prodomain-growth factor complexes are secreted as homodimers. However some can be secreted as heterodimers. This feature is important in the inhibin-activin family and also in BMPs, where the BMP2/BMP7 heterodimer is a potent player. Cleavage at a furin site between the prodomain and growth factor domain occurs either intracellularly prior to secretion or extracellularly after secretion. Further extracellular proteases are sometimes involved in cleavage at additional sites; these include the so-called BMP 1 or tolloid proteases.

[0009] The recent solution of the crystal structure of the latent form of TGF-beta is a first for the entire TGF-beta family and offers deep insights into these complexes (Shi, M. et al., Latent TGF-βstructure and activation. Nature. 2011 Jun. 15; 474(7351):343-9).

### SUMMARY OF THE INVENTION

[0010] The present invention provides compounds, compositions, methods and kits and assays for the modulation of cell signaling, particularly the control and/or regulation of growth factor signaling.

[0011] Specifically provided are methods of modulating the function of a growth factor prodomain complex (GPC) comprising contacting the GPC with one or more growth factor-directed agents (GDAs). In this method, the GDA may comprise a monoclonal antibody. The monoclonal antibody may bind a member selected from the group consisting of a growth factor, a prodomain, the ECCM, a GPC modulatory factor or an epitope formed by the combination of a region or portion of any of the foregoing.

[0012] The present invention provides a method of stabilizing a GPC comprising contacting the GPC with a GPC targeting monoclonal antibody. In this method, stabilization may result in the inhibition of growth factor release from the GPC. Also provided is a method of increasing the level of free growth factor in a cell niche comprising contacting said GPC with a GPC targeting monoclonal antibody.

[0013] The present invention provides a method of modulating a cell signaling pathway comprising contacting a cell comprising a GPC with a GPC targeting monoclonal antibody. In one embodiment, modulation comprises upregulation or an increase in the level of a cell signaling molecule. In another embodiment, modulation comprises downregulation or a decrease in the level of a cell signaling molecule. In either of the previous two embodiments, the cell signaling molecule may be selected from the group of targets consisting of those listed in Tables 3, 4, 5, 6 and 7. In a further embodiment, the cell signaling molecule is selected from the group consisting of the TGF-beta superfamily of targets listed in Table 3.

[0014] The present invention provides a method of altering the distribution of TGF-beta polypeptides in a cell or cell niche comprising contacting a GPC of said cell or cell niche with a GDA. In one embodiment, the GDA comprises a monoclonal antibody. In a further embodiment, the TGF-beta polypeptides are selected from the group consisting of those listed in Table 3 and combinations thereof.

[0015] The present invention provides an isolated monoclonal antibody characterized in that it is specifically immunoreactive with a polypeptide having at least 10 consecutive amino acids of any of the sequences selected from the group consisting of SEQ ID NOs 1-73. In one embodiment, the isolated monoclonal antibody may be human or humanized. In another embodiment, the isolated monoclonal antibody may be immunoreactive in the extracellular environment. In another embodiment, the isolated monoclonal antibody may be immunoreactive with a GPC that has not undergone furin cleavage. In another embodiment, the isolated monoclonal antibody is an inhibitory antibody. In a further embodiment, the inhibitory antibody may inhibit the release of a growth factor from a GPC when coming into contact with the GPC. In a further embodiment, the inhibitory antibody may inhibit the signaling pathway of the growth factor when contacting a GPC. In a further embodiment, the growth factor signaling pathway may be one involving a member of the TGF-beta superfamily selected from the group consisting of any of those listed in Table 3. In another embodiment, the isolated monoclonal antibody is part of a composition. This composition may function to decrease the concentration of a growth factor in or within a cell or cell niche. This composition may further reduce the residence time of the growth factor within the cell or cell niche. The composition may elicit a neomorphic change within the cell or cell niche. The isolated monoclonal antibody may be a releasing antibody. In one embodiment, the releasing antibody promotes the release of a growth factor from a GPC when contacting the GPC. In a further embodiment, the growth factor is a TGF-beta superfamily member selected from the group consisting of any of those listed in Table 3. In another embodiment, the releasing antibody promotes a growth factor signaling pathway upon contacting a GPC. In another embodiment, contacting a GPC with the releasing antibody increases the concentration of the growth factor within a cell or cell niche. In another embodiment, contacting a GPC with the releasing antibody increases the residence time of the growth factor within the cell or cell niche. In another embodiment, contacting a GPC with the releasing antibody elicits a neomorphic change within the cell or cell niche. The composition comprising an isolated monoclonal antibody of the current invention may promote the clearance of a GPC by phagocytosis or pinocytosis.

[0016] The present invention provides a monoclonal antibody obtained by a method comprising the steps of contacting a mammal with at least one peptide, wherein the peptide is at least 70% identical to the sequences selected from the group consisting of the SEQ ID NOs 1-73, collecting cells producing the antibody from the mammal and immortalizing the cells obtained, thereby creating a hybridoma expressing the monoclonal antibodies.

[0017] The present invention provides a method for preparing a polypeptide encoding a GPC targeting antibody comprising the steps of obtaining a host cell, incubating the host cell in culture under conditions to promote expression of the polypeptide encoding a GPC targeting antibody and purifying the expressed antibody from the host cell.

[0018] The present invention provides a pharmaceutical composition comprising as an active ingredient, a monoclonal antibody specific to a GPC or component or an antibody fragment thereof comprising at least an antigen-binding portion, wherein the antibody recognizes an antigenic determinant epitope selected from the group consisting of the SEQ ID NOs 1-73 and a pharmaceutically acceptable carrier.

[0019] The present invention provides a method of treating a subject suffering from a disorder or disease associated with aberrant GPC signaling comprising the step of administering to the subject in need thereof, an antibody specific to a GPC wherein the antibody comprises an antigen-binding-portion and wherein the antibody recognizes an antigenic determinant epitope selected from the group consisting of SEQ ID NOs 1-73.

[0020] Finally, the present invention provides a kit or assay comprising a monoclonal antibody and instructions for use thereof.

### BRIEF DESCRIPTION OF THE FIGURES

[0021] FIG. 1 is a linear representation of a growth factor prodomain complex (GPC) monomer. Within the polypeptide are a secretion signal peptide, prodomain, growth factor domain as well as cysteine residue sites for disulfide bond formation. The GPC is a combination of at least 1 prodomain and 1 mature growth factor.

[0022] FIG. 2 is a diagram depicting alternative views of the cellular environment of a growth factor and the biomolecules that may be involved in growth factor signaling when the growth factor environment is contacted with one or more GDAs of the invention. FIG. 2A. Growth factors may comprise regulatory elements. The GDAs may interact with the regulatory element portion of the growth factor to secure the growth factor in a latent or inactive conformation or to promote growth factor release and/or activity. The ECCM is shown about the growth factor. FIG. 2B. Where the growth factor is found within a growth factor prodomain complex (GPC), a prodomain functions as a regulatory element for a growth factor. Whether the growth factor remains latent or active upon contact with a GDA may depend upon further interactions with components of the ECCM and/or GPC modulatory factors defined herein. In such embodiments, GDAs may interact with any of the elements pictured (GPC, GPC modulatory factor and/or ECCM) to stabilize the latent and/or inactive conformation of the growth factor or to promote growth factor release and/or activity.

[0023] FIG. 3 is a diagram of the TGF-beta superfamily tree, where divergence is proportional to branch length.

### DETAILED DESCRIPTION

[0024] The present invention provides growth factor-directed agents (GDAs), which act as either antagonists or agonists of cell signaling, particularly in the TGF-beta and related extracellular matrix signaling pathways.

[0025] GDAs may comprise antibodies, fusion proteins, novel polypeptides, nucleic acids and/or small molecule compositions and/or conjugates thereof. Further provided are methods, kits and assays for exploiting GDAs as well as novel antigens for production of specific GDAs such as antibodies.

### I. COMPOSITIONS OF THE INVENTION

### Growth Factor Directed Agents (GDAs)

[0026] In certain embodiments, the present invention provides compounds as well as compositions that comprise at least one growth factor directed agent, or GDA. As used herein, the term “growth factor” refers to one or more biomolecules that stimulate changes in cell behavior including, but not limited to changes in cell growth, cell proliferation and cell differentiation. Growth factors may be peptides or polypeptides and may be associated with other types of biomolecules. Common growth factors include, but are not limited to bone morphogenetic proteins (BMPs), brain-derived neurotrophic factor (BDNF), epidermal growth factor (EGF), erythropoietin (EPO), fibroblast growth factor (FGF), glial cell line-derived neurotrophic factor (GDNF), granulocyte colony-stimulating factor (G-CSF), granulocyte macrophage colony-stimulating factor (GM-CSF), growth differentiation factor-9 (GDF9), hepatocyte growth factor (HGF), hepatoma-derived growth factor (HDGF), insulin-like growth factor (IGF), migration-stimulating factor, nerve growth factor (NGF), placental growth factor (PGF), platelet-derived growth factor (PDGF), thrombopoietin (TPO), transforming growth factor alpha (TGF-α) family members, transforming growth factor beta (TGF-beta) family members, tumor necrosis factor-alpha (TNF-α), vascular endothelial growth factor (VEGF), and Wnt and Notch signaling pathway members.

As used herein, the term “growth factor directed agent” or “GDA” refers to an exogenously supplied compound, composition or entity which functions to alter, modulate, antagonize, agonize or in some way perturb growth factor associated cell signaling. In general, GDAs may be any chemical entity. In some embodiments, GDAs may comprise polymeric or nonpolymeric entities. In some embodiments, GDAs may comprise one or more antibodies, fusion proteins, novel polypeptides, nucleic acids, glycans, lipids and/or small molecule compositions and/or conjugates and/or combinations thereof. In some embodiments, GDAs are directed toward one or more regulatory elements. In some embodiments, GDAs modulate TGF-beta or TGF-beta family member growth factor associated cell signaling. In some embodiments, GDAs modulate growth factor associated cell signaling by contacting at least one growth factor prodomain complex (GPC). In some embodiments, GDAs modulate growth factor associated cell signaling by contacting one or more extacellular and/or cellular matrix (ECCM) components.

### Growth Factor Directed Agents (GDAs): Target Sites

[0027] In some embodiments, GDAs are directed toward at least one target site. As used herein, the term “target site” refers to one or more regions of interaction between GDA compounds or compositions and biomolecules or biostructures in a cell, tissue, organ or organism. In some embodiments, target sites may reside exclusively on one protein or may be formed by two or more proteins.

[0028] In some embodiments, target sites may comprise biomolecules including, but not limited to proteins, sugars, lipids and nucleic acid molecules. In some embodiments, target sites comprise any other form of binding epitope. GDA target sites contemplated include any and all possible regions of interaction for altering, enhancing or inhibiting growth factor function. A target site may be found in or on a growth factor, a growth factor prodomain, a growth factor prodomain complex (GPC), a GPC modulatory factor or any biomolecule of the ECCM.

[0029] Alternatively or additionally, such sites may include regions of interaction between ECCM components, regulatory elements, growth factors, receptors, ligands, GPCs and GPC modulatory factors.

[0030] As used herein, the term “GPC” or “growth factor prodomain complex” refers to a combination of mature growth factor with its prodomain. In some embodiments, polypeptides of GPC prodomains are contiguous with a growth factor. In some embodiments, polypeptides of GPC prodomains are not linked via regular peptide bonds with a growth factor, but remain associated through chemical bonds and/or molecular interactions including, but not limited to non-covalent bonds, ionic bonds, hydrogen bonds, hydrophobic interactions, dipole-dipole interactions and/or Van der Waals forces. In some embodiments, GPCs comprise TGF-beta family members.

[0031] Target sites may include one or more regulatory elements. As used herein, the term “regulatory element” refers to one or more regions, moieties, or domains, contiguous with, present within or on, and/or bound directly or indirectly to one or more growth factors that modulates growth factor activity. GDAs may bind or interact with any number of target sites on or along regulatory elements and/or GPCs or associated structures to agonize, antagonize or otherwise modulate growth factor activity.

[0032] In some embodiments, contact between a GDA and a regulatory elements leads to a conformational, structural and/or 3-dimensional change in regulatory element and/or growth factor structure. In some embodiments, contact between GDAs and regulatory elements leads to release of growth factor from regulatory elements.

[0033] In some embodiments, contact between GDAs and regulatory elements results in an increase in growth factor activity. In some embodiments, contact between GDAs and regulatory elements leads to a decrease in growth factor activity.

[0034] In some embodiments, contact between GDAs and regulatory elements prevents release of a growth factor from a regulatory element.

[0035] In some embodiments, regulatory elements comprise at least one prodomain of a GPC. As used herein, the term “prodomain” refers to an N-terminal protein domain synthesized contiguously with functional proteins, but typically cleaved from mature proteins. Prodomains may be a few (10) to hundreds of amino acids in length. In some embodiments, prodomains are post-translationally modified. Such post-translational modifications include, but are not limited to phosphorylation, ubiquitination, glycosylation and pyrolization.

[0036] In some embodiments, GDAs may serve to stabilize retention of mature growth factors by GPCs to reduce growth factor activity. GDAs may release mature growth factors from GPCs to enhance growth factor activity.

[0037] In some embodiments, GDAs modulate the ratio of active and/or free growth factor relative to inactive and/or sequestered growth factor upon introduction of GDAs to one or more GPCs or one ore more natural depots of GPCs or to any other forms of growth factor sequestration. In some embodiments, GDA-induced modulations such growth factor ratios may be localized to a particular cell niche. In some embodiments, GPC contact with a GPC modulatory factor may stimulate release of mature growth factor in the absence of a GDA.

[0038] As used herein, the term “GPC modulatory factor” refers to any endogenous biomolecule or biomolecules capable of modulating GPCs through direct or indirect interaction with the GPC. GPC modulatory factors include, but are not limited to integrins, tolloid/BMP proteases, thrombospondin, fibrillins, metalloproteases, crypto and furin/PACE. In some embodiments, GPC modulatory factors comprise one or more cells or entities bound to cells.

[0039] Administration or contact with one or more GDAs of the invention may, in turn, trigger the contact of GPCs with GPC modulatory factors, producing any of several outcomes. In some embodiments, contact of GPCs with GPC modulatory factors may result in release of mature growth factor from a GPC. In some embodiments, contact of GPCs with GPC modulatory factors may result in retention of growth factors by GPCs. In some embodiments, contact of GPCs with GPC modulatory factors may result in increased growth factor activity. In some embodiments, contact of GPCs with GPC modulatory factors may result in decreased growth factor activity.

### Growth Factor Directed Agents (GDAs): ECCM and Niches

[0040] As used herein, the term, “extracellular and cellular matrix” or ECCM refers to both the extracellular matrix and the cellular matrix as well as additional proteins or molecules (including but not limited to proteins, nucleic acids, membranes, lipids and sugars) that may be directly or indirectly associated with components of the extracellular and cell surface environments. In some embodiments, ECCM components include molecules such as, but not limited to, latent TGF-beta-binding protein (LTBP), fibrillin, elastin, collagen and the like. In some embodiments, ECCM components include cells and platelets. In some embodiments, ECCM components include cell and platelet surface associated proteins and molecules including, but not limited to glycoprotein-A repetitions predominant protein (GARP), receptors, proteoglycans, carbohydrate molecules, integral membrane proteins, glycolipids and the like. In some embodiments, ECCM components include GPC modulatory factors. In some embodiments, modulation of a growth factor signaling pathway may occur within a particular cell niche. Therefore, GDAs may be designed to operate, target and/or function within a particular cell niche. As used herein, the term “cell niche” refers to a unique set of physiologic conditions in a cellular system within a tissue, organ or organ system within or derived from a mammalian organism. A cell niche may occur in vivo, in vitro, ex vivo, or in situ. Given the complex nature and the dynamic processes involved in growth factor signaling, a cell niche may be characterized functionally, spatially or temporally or may be used to refer to any environment that encompasses one or more cells. As such, in some embodiments a cell niche includes the environment of any cell adjacent to another cell that provides support, such as for example a nurse cell.

[0041] As used herein, a “functional cell niche” is one which is characterized by a set of biomolecular functions, whether catalytic (such as those involving enzymes), structural (such as co-factors, etc), electronic (such as ion concentration or pH measures), replicative, regenerative and/or repairing (such as DNA and RNA functions), transmissive (such as ion channels, etc), functioning milieus (such as a lipid or glycosylation layers or coatings, matrices, etc), apoptotic or combinations thereof. In some embodiments, GDAs within a functional cell niche will produce one or more phenotypic changes in at least one biomolecular function associated with a functional cell niche. An example of a functional cell niche is one that involves TGF-beta growth factor signaling. GDAs acting within a TGF-beta functional cell niche, may produce phenotypic changes such as the modulation (up or down) of growth factor or GPC levels. Changes effected by the action of GDAs may also manifest as downstream changes associated with biomolecular functions triggered by growth factor or GPC levels.

[0042] As used herein, a “spatial cell niche” is one which is characterized by orientation in space. A spatial cell niche, when found within an organ or tissue, typically includes only cells within that organ or tissue. A spatial cell niche may comprise a microenvironment within a cell niche in which a GDA functions. In such cases, cell niches may be defined by contacted cells and neighboring cells in direct contact with contacted cells. Examples of spatial cell niches include sites or regions in tissues or organs, such as for example in tumors. GDAs may act within a spatial niche to effect changes in niches or overall organisms. Such changes may be phenotypic changes as evidenced by modulation (up or down) of biomolecule level and/or activity or by structural changes in the spatial niches such as cell shapes or connectivity to other cells.

[0043] As used herein, a “temporally defined cell niche” is one which is characterized by timed events. A temporal cell niche may comprise a series or set of events such as time to onset or duration of GDA effects, measures in Tₘₐₓ, Cₘₐₓ or other pharmacokinetic or pharmacodynamic parameters typically measured over time.

[0044] In some embodiments, GDAs may act to modulate one or more distinct or separate cell niches and may act repeatedly. In some embodiments, GDAs modulate the ratio of active and/or free growth factor relative to inactive and/or sequestered growth factor upon the introduction of GDAs to one or more cell niches, one or more natural depots or to any other sites of growth factor sequestration. In some embodiments, the ratio may be modulated by at least 10%, 20%, 30%, 40%, 50% or more.

[0045] Modulation of a cell niche may be by at least 10%, 20%, 30%, 40%, 50% or more. Measurement of perturbation or modulation will be determined based upon the type of cell niche and such methods are known in the art to those of skill. For example, alteration or modulation of a spatial cell niche may be defined by at least 10% change in the location or conformation of a cell or cell microenvironment. Such changes are easily detectible with standard microscopic techniques, with fluorescent microscopic techniques or by using labeling studies. Such changes may also be detected at the level of protein and/or gene expression using techniques known in the art including, but not limited to Western blot, Northern blot, reverse transcriptase (RT) polymerase chain reaction (PCR) conversion of mRNA to DNA followed by PCR amplification for use in Southern blotting or Real Time RT-PCR, PCR array, gene array, cell-based reporter assays and the like. In some embodiments, the sensitivity of such assays is at least 10%, at least 20%, at least 30% or more than 30%. In some embodiments, modulation may be measured according to methods that apply surface Plasmon resonance technology.

[0046] In some embodiments, modulation may be measured through the detection of a biological response and/or the detection of protein modifications resulting from cell signaling events such as protein modifications in cell signaling cascades. Such modifications include, but are not limited to protein phosphorylation, protein dephosphorylatoin, protein ubiquitinylation, protein degradation, protein cleavage, protein localization and protein mislocalization.

[0047] In the case of TGF-beta family member signaling, phosphorylation of SMAD proteins or activation of transcription of downstream genes may be detected.

[0048] In one embodiment, detection methods may include the use of antibodies to phosphoSMAD followed by immunoperoxidase-based visualization of bound antibodies. Alternatively, induction of gene expression may be detected in monolayer cell cultures or tissue sections using a TGF-beta-inducible promoter driving expression of GFP or luciferase. Methods disclosed above have been described in previous publications including, Wang, R. et al., GARP regulates the bioavailability and activation of TGF β. Mol Biol Cell. 2012 March; 23(6):1129-39; Abe, M. et al., An assay for transforming growth factor-beta using cells transfected with a plasminogen activator inhibitor-1 promoter-luciferase construct. Anal Biochem. 1994 Feb. 1; 216(2):276-84; U.S. Pat. No. 7,015,906; U.S. Pat. No. 5,967,979; U.S. Pat. No. 7,863,569; U.S. Pat. No. 7,297,961; U.S. Pat. No. 7,738,107; U.S. Pat. No. 6,784,999 and U.S. Pat. No. 7,358,056 all of which are incorporated herein by reference in their entirety.

### Growth Factor Directed Agents: Antibodies

[0049] GDAs may comprise antibodies or fragments thereof. As used herein, the term “antibody” is used in the broadest sense and specifically covers various embodiments including, but not limited to monoclonal antibodies, polyclonal antibodies, multispecific antibodies (e.g. bispecific antibodies formed from at least two intact antibodies), and antibody fragments such as diabodies so long as they exhibit a desired biological activity. Antibodies are primarily amino-acid based molecules but may also comprise one or more modifications such as with sugar moieties.

[0050] “Antibody fragments” comprise a portion of an intact antibody, preferably comprising an antigen binding region thereof. Examples of antibody fragments include Fab, Fab′, F(ab′)2, and Fv fragments; diabodies; linear antibodies; single-chain antibody molecules; and multispecific antibodies formed from antibody fragments. Papain digestion of antibodies produces two identical antigen-binding fragments, called “Fab” fragments, each with a single antigen-binding site. Also produced is a residual “Fc” fragment, whose name reflects its ability to crystallize readily. Pepsin treatment yields an F(ab′)2 fragment that has two antigen-binding sites and is still capable of cross-linking antigen. GDAs may comprise one or more of these fragments. For the purposes herein, an “antibody” may comprise a heavy and light variable domain as well as an Fc region.

[0051] “Native antibodies” are usually heterotetrameric glycoproteins of about 150,000 daltons, composed of two identical light (L) chains and two identical heavy (H) chains. Each light chain is linked to a heavy chain by one covalent disulfide bond, while the number of disulfide linkages varies among the heavy chains of different immunoglobulin isotypes. Each heavy and light chain also has regularly spaced intrachain disulfide bridges. Each heavy chain has at one end a variable domain (V_{H}) followed by a number of constant domains. Each light chain has a variable domain at one end (V_{L}) and a constant domain at its other end; the constant domain of the light chain is aligned with the first constant domain of the heavy chain, and the light chain variable domain is aligned with the variable domain of the heavy chain.

[0052] As used herein, the term “variable domain” refers to specific antibody domains that differ extensively in sequence among antibodies and are used in the binding and specificity of each particular antibody for its particular antigen.

As used herein, the term “Fv” refers to antibody fragments which contain a complete antigen-recognition and antigen-binding site. This region consists of a dimer of one heavy chain and one light chain variable domain in tight, non-covalent association.

[0053] Antibody “light chains” from any vertebrate species can be assigned to one of two clearly distinct types, called kappa and lambda based on amino acid sequences of their constant domains. Depending on the amino acid sequence of the constant domain of their heavy chains, antibodies can be assigned to different classes. There are five major classes of intact antibodies: IgA, IgD, IgE, IgG, and IgM, and several of these may be further divided into subclasses (isotypes), e.g., IgG1, IgG2, IgG3, IgG4, IgA, and IgA2.

“Single-chain Fv” or “scFv” as used herein, refers to a fusion protein of V_{H} and V_{L} antibody domains, wherein these domains are linked together into a single polypeptide chain. In some embodiments, the Fv polypeptide linker enables the scFv to form the desired structure for antigen binding.

[0054] The term “diabodies” refers to small antibody fragments with two antigen-binding sites, which fragments comprise a heavy chain variable domain V_{H} connected to a light chain variable domain V_{L} in the same polypeptide chain. By using a linker that is too short to allow pairing between the two domains on the same chain, the domains are forced to pair with the complementary domains of another chain and create two antigen-binding sites. Diabodies are described more fully in, for example, EP 404,097; WO 93/11161; and Hollinger et al., Proc. Natl. Acad. Sci. USA, 90:6444-6448 (1993), the contents of each of which are incorporated herein by reference in their entirety.

[0055] The term “monoclonal antibody” as used herein refers to an antibody obtained from a population of substantially homogeneous cells (or clones), i.e., the individual antibodies comprising the population are identical and/or bind the same epitope, except for possible variants that may arise during production of the monoclonal antibody, such variants generally being present in minor amounts. In contrast to polyclonal antibody preparations that typically include different antibodies directed against different determinants (epitopes), each monoclonal antibody is directed against a single determinant on the antigen

[0056] The modifier “monoclonal” indicates the character of the antibody as being obtained from a substantially homogeneous population of antibodies, and is not to be construed as requiring production of the antibody by any particular method. The monoclonal antibodies herein include “chimeric” antibodies (immunoglobulins) in which a portion of the heavy and/or light chain is identical with or homologous to corresponding sequences in antibodies derived from a particular species or belonging to a particular antibody class or subclass, while the remainder of the chain(s) is identical with or homologous to corresponding sequences in antibodies derived from another species or belonging to another antibody class or subclass, as well as fragments of such antibodies.

[0057] “Humanized” forms of non-human (e.g., murine) antibodies are chimeric antibodies that contain minimal sequence derived from non-human immunoglobulin. For the most part, humanized antibodies are human immunoglobulins (recipient antibody) in which residues from the hypervariable region from an antibody of the recipient are replaced by residues from the hypervariable region from an antibody of a non-human species (donor antibody) such as mouse, rat, rabbit or nonhuman primate having the desired specificity, affinity, and capacity.

[0058] The term “hypervariable region” when used herein in reference to antibodies refers to regions within the antigen binding domain of an antibody comprising the amino acid residues that are responsible for antigen binding. The amino acids present within the hypervariable regions determine the structure of the complementarity determining region (CDR). As used herein, the “CDR” refers to the region of an antibody that comprises a structure that is complimentary to its target antigen or epitope.

[0059] In some embodiments, GDAs of the present invention may be antibody mimetics. The term “antibody mimetic” refers to any molecule which mimics the function or effect of an antibody and which binds specifically and with high affinity to their molecular targets. In some embodiments, antibody mimetics may be monobodies, designed to incorporate the fibronectin type III domain (Fn3) as a protein scaffold (U.S. Pat. No. 6,673,901; U.S. Pat. No. 6,348,584). In some embodiments, antibody mimetics may be those known in the art including, but are not limited to affibody molecules, affilins, affitins, anticalins, avimers, DARPins, Fynomers and Kunitz and domain peptides. In other embodiments, antibody mimetics may include one or more non-peptide region.

[0060] As used herein, the term “antibody variant” refers to a biomolecule resembling an antibody in structure and/or function comprising some differences in their amino acid sequence, composition or structure as compared to a native antibody.

[0061] The preparation of antibodies, whether monoclonal or polyclonal, is know in the art. Techniques for the production of antibodies are well known in the art and described, e.g. in Harlow and Lane “Antibodies, A Laboratory Manual”, Cold Spring Harbor Laboratory Press, 1988 and Harlow and Lane “Using Antibodies: A Laboratory Manual” Cold Spring Harbor Laboratory Press, 1999.

[0062] In one embodiment, GDAs comprising antibodies, antibody fragments, their variants or derivatives as described above are specifically immunoreactive with GPCs, GPC modulatory factors or the ECCM. In a preferred embodiment, GDAs comprising antibodies or antibody fragments are specifically immunoreactive with the TGF-beta GPC or TGF-beta growth factor. GDAs comprising antibodies or fragments of antibodies may also bind to target sites on TGF-beta family member GPCs, TGF-beta family members, Wnt signaling components or Notch signaling components.

[0063] In some embodiments, antibodies of the present invention may be immunoreactive to receptors, natural antagonists or other components of the growth factor cell signaling machinery.

### Growth Factor Directed Agents (GDAs): Antibodies, Characterization

[0064] Antibodies of the present invention may be characterized by their target molecule(s), by the antigens used to generate them, by their function (whether as agonists or antagonists) and/or by the cell niche in which they function.

[0065] GDA antibodies of the present invention may function as releasing (agonist) or inhibiting (antagonist) antibodies. As used herein, the term “releasing antibody” refers to an antibody that increases the ratio of active and/or free growth factor relative to inactive and/or sequestered growth factor upon the introduction of the antibody to a GPC, cell, niche, natural depot or any other site of growth factor sequestration. In this context, the releasing antibodies may be characterized as agonists. As used herein, a “natural depot” is a location within a cell, tissue or organ where increased levels of a biomolecule or ion are stored. For example, the extracellular matrix may act as a natural depot for one or more growth factors.

[0066] The contact necessary for release can be defined as direct or indirect contact of antibody with a GPC or a component thereof or with a cellular structure such as cell matrix or fibrillin for release of growth factor. Release of at least 5%, 10%, 20%, 30%, 40%, 50%, 60%, 70%, 80%, 90% or more of growth factor is sufficient to characterize a GDA antibody as a releasing antibody. It is understood that growth factor release after GDA antibody administration may be local and may occur over a sustained period of time and may include peaks or spikes of release. GDA antibodies of the present invention may act to release a growth factor over minutes, hours, days or longer.

[0067] Release profiles may have an initial peak or burst within from about 4 hours to about 7 days of contacting in vivo or shorter periods in vitro. For example, initial peak or burst may occur from about 4 hours to about 5 hours, or from about 4 hours to about 6 hours, or from about 4 hours to about 7 hours, or from about 4 hours to about 8 hours, or from about 4 hours to about 9 hours, or from about 4 hours to about 10 hours, or from about 4 hours to about 11 hours, or from about 4 hours to about 12 hours, or from about 4 hours to about 24 hours, or from about 4 hours to about 36 hours, or from about 4 hours to about 48 hours, or from about 1 day to about 7 days, or from about 1 day to about 2 days, or from about 1 day to about 3 days, or from about 1 day to about 4 days, or from about 4 days to about 5 days, or from about 4 days to about 6 days, or from about 4 days to about 7 days. GDAs may stimulate the release of 5 to 100% of the growth factor present. For example, the percent of growth factor release may be from about 5% to about 10%, or from about 5% to about 15%, or from about 5% to about 20%, or from about 5% to about 25%, or from about 10% to about 30%, or from about 10% to about 40%, or from about 10% to about 50%, or from about 10% to about 60%, or from about 20% to about 70%, or from about 20% to about 80%, or from about 40% to about 90%, or from about 40% to about 100%.

[0068] As used herein, the term “inhibitory antibody” or “stabilizing antibody” refers to an antibody that decreases the ratio of active and/or free growth factor relative to inactive and/or sequestered growth factor upon the introduction of the antibody to one or more GPCs, cell, niches, natural depots and/or any other sites of growth factor sequestration. In this context, antibodies may be characterized as antagonists. As used herein, an “antagonist” is one which interferes with or inhibits the physiological action of another. Antagonist action may even result in stimulation or activation of signaling downstream and hence may act agonistically relative to another pathway, separate from the one being antagonized. Pathways are interelated, so, in one nonlimiting example, a TGF-beta antagonist could act as a BMP agonist and vice versa. As used herein, “downstream” means any signaling or cellular event that happens after the action, binding or targeting by GDAs.

[0069] Contact necessary for inhibition or stabilization may be direct or indirect contact between antibody and GPC or a component thereof or with cellular structures such as cell matrix or fibrillin whereby release of growth factor is inhibited Inhibition of release of at least 5%, 10%, 20%, 30%, 40%, 50%, 60%, 70%, 80%, 90% or more of growth factors is sufficient to characterize GDA antibodies as inhibitory or stabilizing. Inhibitory GDA antibodies may stabilize GPCs and trap them as heterodimers.

[0070] It is understood that inhibition of growth factor release after contact with a GDA antibody may be local and may occur over a sustained period of time and may include peaks, troughs or spikes Inhibitory antibodies which may also function to stabilize GPCs may be defined by their release kinetics. Release of growth factor and corresponding release kinetics, even locally, may be directly measured or inferred by downstream signaling events. In some embodiments, changes in protein or nucleic acid concentrations or phenotypic responses may be indicative of the effects of GDAs.

[0071] GDA antibodies may act to inhibit release of a growth factor over minutes, hours, or days Inhibition or stabilization profiles may have an initial trough within from about 4 hours to about 7 days of introduction in vivo or shorter periods in vitro. For example, initial trough of inhibition or stabilization may occur from about 4 hours to about 5 hours, or from about 4 hours to about 6 hours, or from about 4 hours to about 7 hours, or from about 4 hours to about 8 hours, or from about 4 hours to about 9 hours, or from about 4 hours to about 10 hours, or from about 4 hours to about 11 hours, or from about 4 hours to about 12 hours, or from about 4 hours to about 24 hours, or from about 4 hours to about 36 hours, or from about 4 hours to about 48 hours, or from about 1 day to about 7 days, or from about 1 day to about 2 days, or from about 1 day to about 3 days, or from about 1 day to about 4 days, or from about 4 days to about 5 days, or from about 4 days to about 6 days, or from about 4 days to about 7 days. GDA introduction may lead to inhibition or stabilization of 5% to 100% of growth factor present. For example, the percent of growth factor inhibition or stabilization may be from about 5% to about 10%, or from about 5% to about 15%, or from about 5% to about 20%, or from about 5% to about 25%, or from about 10% to about 30%, or from about 10% to about 40%, or from about 10% to about 50%, or from about 10% to about 60%, or from about 20% to about 70%, or from about 20% to about 80%, or from about 40% to about 90%, or from about 40% to about 100%.

[0072] GDAs comprising antibodies may act to decrease local concentration of one or more GPC through removal by phagocytosis, pinocytosis, or inhibiting assembly in the ECCM. GDA introduction may lead to the removal of 5% to 100% of the growth factor present in a given area. For example, the percent of growth factor removal may be from about 5% to about 10%, or from about 5% to about 15%, or from about 5% to about 20%, or from about 5% to about 25%, or from about 10% to about 30%, or from about 10% to about 40%, or from about 10% to about 50%, or from about 10% to about 60%, or from about 20% to about 70%, or from about 20% to about 80%, or from about 40% to about 90%, or from about 40% to about 100%.

[0073] Measures of release, inhibition or removal of a growth factor may be made relative to a standard or to the natural release or activity of growth factor under normal physiologic conditions, in vitro or in vivo. Measurements may also be made relative to the presence or absence of GDA antibodies. Such methods of measuring growth factor levels, release, inhibition or removal include standard measurement in tissue or fluids such as serum or blood such as Western blot, enzyme-linked immunosorbent assay (ELISA), activity assays, reporter assays, luciferase assays, polymerase chain reaction (PCR) arrays, gene arrays, Real Time reverse transcriptase (RT) PCR and the like.

[0074] GDA antibodies may bind or interact with any number of locations on or along GPCs or their associated structures to either enhance or inhibit growth factor signaling. GDA antibody target sites contemplated include any and all possible sites for altering, enhancing or inhibiting GPC function. In some embodiments, such sites include, but are not limited to sites on or within growth factors, regulatory elements, GPCs, GPC modulatory factors, growth factor receiving cells or receptors, ECCM components and/or epitopes formed by combining regions or portions of any of the foregoing.

[0075] GDA compounds of the present invention exert their effects via binding (reversibly or irreversibly) to one or more target sites. While not wishing to be bound by theory, target sites which represent a binding site for an antibody, are most often formed by proteins or protein domains or regions. However, target sites may also include biomolecules such as sugars, lipids, nucleic acid molecules or any other form of binding epitope.

[0076] One type of antagonist antibody of the present invention would bind to the prodomain of TGF-beta and stabilize against integrin-mediated release, for example, by blocking the RGD site or by stabilizing the structure. Such an antibody would be useful in the treatment of Camurati-Engelmann disease, in which mutations in the prodomain cause excessive TGF-beta activation. Such antibodies would also be useful in Marfan's syndrome, in which mutations in fibrillins or LTBP alter TGF-beta and BMP activation.

[0077] In some embodiments, GDA antibodies selectively inhibit the release of TGF-beta from GPCs associated with LTBP's but not those associated with GARP. Such antibodies function as anti-fibrotic therapeutics but exhibit minimal inflammatory effects. In one embodiment, GPC-LTBP complex binding antibodies do not bind GPC-GARP complexes. Such antibodies, while not specific to a particular LTBP or GPC, do bind to the GPC close to or overlapping the GARP binding site, such that binding is impeded by GARP, but not by LTBPs. In one embodiment, antibodies are provided that selectively bind a combinatorial epitope between GARP and proTGF-beta. In one embodiment, GDA antibodies are provided which induce release of TGF-beta from GARP-proTGF-beta complexes. Such antibodies are selected for their ability to bind to the GARP prodomain binary complex but not GARP-proTGF-beta ternary complex, GARP alone, or prodomain alone.

[0078] Alternatively or additionally, GDA antibodies of the present invention may function as ligand mimetics which would induce internalization of the GPC. They may act as nontraditional payload carriers, acting to deliver or ferry bound or conjugated drug payloads to specific GPC or GPC-related sites.

[0079] Changes elicited by antibodies of the present invention may result in a neomorphic change in the cell. As used herein, “a neomorphic change” is a change or alteration that is new or different. For example, an antibody that elicits the release or stabilization of a growth factor not typically associated with the GPC targeted by the antibody, would be a neomorphic antibody and the release would be a neomorphic change.

[0080] In some embodiments, compounds or agents of the invention act to alter or control proteolytic events. Such events may be intracellular or extracellular. They may include the alteration of furin cleavage or other proteolytic processing events. Such events may comprise proteolytic processing of growth factor signaling molecules or downstream cascades initiated by growth factor signaling molecules.

[0081] GDA antibodies may induce or inhibit dimerization or multimerization of growth factors (ligands) or their receptors. Such action may be through the stabilization of monomeric, dimeric or multimeric forms. It may also be through the disruption of dimeric or multimeric complexes.

[0082] GDA antibodies may act on homo or heterodimers of the monomeric units comprising either receptor groups or GPCs or other signaling molecule pairs.

[0083] Antibodies of the present invention may be internalized into cells prior to binding to its target. Upon internalization, they may act to increase or decrease a signaling event, release or stabilize one or more GPCs, block or facilitate growth factor release, or alter one or more cell niche.

[0084] GDA compounds and compositions of the invention may also alter the residence time of the growth factor in the GPC or GPC in the extracellular/cellular matrix (ECCM). This alteration may result in irreversible localization or transient localization.

### Growth Factor Directed Agents: Antigens

[0085] Although it was recently realized that TGF-beta family members all have a prodomain with a common three dimensional structure, the sequence and hence structure of the prodomains are highly divergent (Shi, M. et al., Latent TGF-β structure and activation. Nature. 2011 Jun. 15; 474(7351):343-9). This divergence encodes great specialization of the prodomains in regulating targeting and release of the growth factors in the extracellular environment.

[0086] There are subfamilies within the TGF-beta family; these correspond to the major branches shown in FIG. 3, where divergence is proportional to branch length. Between human and mouse, TGF-beta1, 2 and 3 prodomains are 85, 96, and 97% identical; whereas the growth factor domains are 99, 97, and 100% identical. Thus, both the prodomains and growth factor domains are highly conserved across species. By contrast, among human TGF-beta1/TGF-beta 2, TGF-beta 1/TGF-beta 3, and TGF-beta 2/TGF-beta 3, the prodomains are 34, 33, and 47% identical; whereas the mature growth factor domains are 71, 77, and 79% identical. Thus, even within a TGF-beta subfamily, the prodomains are poorly conserved, whereas the growth factor domains, which bind to identical type I and II receptors are much better conserved. In keeping with the high conservation among the TGF-beta 1, 2, and 3 growth factor domains of 71 to 79%, it has been possible to raise antibodies which are cross-reactive, but not specific, among TGF-beta 1, 2, and 3 in humans. These antibodies have been in use in clinical trials.

[0087] The great difference among the 3 TGF-beta prodomains is reflected by diversity in the biological mechanisms that release them from latency. For example, both TGF-beta 1 and TGF-beta 3 have an RGD sequence in their prodomains that is required for their activation, which occurs as a consequence of force exerted on the prodomain by integrins αᵥβ₆ and αᵥβ₈. TGF-beta 2 has no such RGD sequence and its activation involves distinct mechanisms that include proteases.

[0088] Within the TGF-beta subfamily as within other subfamilies there are also some subtle differences. For example, while TGF-beta 1, 2 and 3 bind exactly the same type I and type II receptors, TGF-beta 2 has markedly lower affinity; thus its signaling is uniquely dependent on a co-receptor known as beta-glycan. TGF-beta 2 also differs from TGF-beta 1 and 3 by having two splice variants that differ by a short insertion in the prodomain. Heterodimers may also form among 1, 2, and 3.

[0089] The high sequence identity between human and mouse orthologs in the TGF-beta family has important implications for the derivation of antibodies. It has been quite difficult to raise antibodies specific for TGF-beta 2 and TGF-beta 3 by immunization across species, in agreement with their 96 to 97% identity cited above. Furthermore there are few antibodies to TGF-beta 1, and their biology is poorly characterized. Add to this that the divergence between human and mouse TGF-beta1 is not evenly distributed throughout the sequence but limited to certain structural loops (the β1-β2, β3-β4, and α4-β7 loops and to a region from the β8-β9 loop to the portion of the (β9-β10 loop preceding the RGD sequence) and antibody development is almost impossible.

[0090] The present invention utilizes the divergent prodomain polypeptide and peptide sequences, in whole or in part, as antigens to design and develop GDAs using the methods described herein.

[0091] As used herein, an “antigen” is a substance which induces or evokes an immune response in an organism. An immune response is characterized by the reaction of the cells, tissues and/or organs of an organism to the presence of a foreign substance. Such immune response typically leads to the production by the organism of one or more antibodies against the foreign substance, e.g., antigen or a portion of the antigen. Antigens of the invention may comprise a peptide, polypeptide, fusion protein, or any of the foregoing and may be conjugated or complexed to one or more separate adjuvants or heterologous proteins.

[0092] As used herein, an “adjuvant” is a pharmacological or immunological agent that modifies the effect of other agents. Adjuvants according to the present invention include, but are not limited chemical compositions, biomolecules, therapeutics, and/or therapeutic regimens.

[0093] In some embodiments, antigens of the invention comprise at least a portion of a prodomain of a TGF-beta family member and optionally one or more regions of intervening or flanking homologous or heterologous sequences. As used herein, “prodomain” means a region or section of a molecule preceding another. Often prodomains are synthesized as part of a larger protein and may play any number of roles from structural to functional, acting as a binding site, a protective partner, a signaling molecule, a trafficking entity, a stability enhancer, etc. The prodomains of the TGF-beta family members serve as unique antigens of the invention. Ranging in size from 200-450 amino acids, the entire prodomain or a portion thereof may be used as an antigen.

[0094] As used herein, a prodomain-derived antigen may comprise at least 5, 10, 15, 20, 25, 30, 35, 40, 45, 50, 55, 60, 65, 70, 75, 80, 85, 90, 95, 100, 105, 110, 115, 120, 125, 130, 135, 140, 145, 150, 155, 160, 165, 170, 175, 180, 185, 190, 195, 200, 250, 300, 350, 400, 450 or more amino acids selected from SEQ ID NOs. 1-37.

[0095] Intervening sequences which may be used as a component of an antigen may include homologous or heterologous sequences. These may be selected from other prodomains or from non-prodomain protein sequences.

[0096] Flanking sequences which may be used as a component of an antigen may include homologous or heterologous sequences. These may be selected from other prodomains or from non-prodomain protein sequences.

[0097] A list of exemplary TGF-beta family pro-proteins, i.e. the protein after removal of the secretion signal sequence, is shown in Table 1. The pro-protein contains, and is the precursor of, the prodomain and the growth factor. Shown in the Table are the names of the originating TGF-beta family member and the pro-protein sequence. Also identified in “bold” and “underlined” are furin cleavage sites. Upon furin cleavage, the resulting prodomain retains this site, whereas the mature growth factor begins following the furin cleavage site. It is noted that Lefty1 and Lefty2 are not cleaved. It is noted that some prodomains may be cleaved by furin (PACE) enzymes at additional sites, and by tolloid proteases. In some embodiments, pro-proteins may be cleaved at a first furin cleavage site (the first site being the site closest to the N-terminus). In some embodiments, pro-proteins may be cleaved at a furin cleavage site other than a first furin cleavage site.

TABLE 1
Pro-proteins of the TGF-beta family

| | | SEQ |
|---|---|---|
| TGF | | ID |
| Member | Prodomain and growth factor Sequence | NO |
| TGF-beta 1 | LSTCKTIDMELVKRKRIEAIRGQILSKLRLASPPSQGEVPPGPLPEAV | 1 |
| | LALYNSTRDRVAGESAEPEPEPEADYYAKEVTRVLMVETHNEIYD | |
| | KFKQSTHSIYMFFNTSELREAVPEPVLLSRAELRLLRLKLKVEQHVE | |
| | LYQKYSNNSWRYLSNRLLAPSDSPEWLSFDVTGVVRQWLSRGGEI | |
| | EGFRLSAHCSCDSRDNTLQVDINGFTTGRRGDLATIHGMNRPFLLL | |
| | MATPLERAQHLQSSRHRRALDTNYCFSSTEKNCCVRQLYIDFRKD | |
| | LGWKWIHEPKGYHANFCLGPCPYIWSLDTQYSKVLALYNQHNPGA | |
| | SAAPCCVPQALEPLPIVYYVGRKPKVEQLSNMIVRSCKCS | |
| TGF-beta 2 | SLSTCSTLDMDQFMRKRIEAIRGQILSKLKLTSPPEDYPEPEEVPPEVI | 2 |
| | SIYNSTRDLLQEKASRRAAACERERSDEEYYAKEVYKIDMPPFFPSE | |
| | NAIPPTFYRPYFRIVRFDVSAMEKNASNLVKAEFRVFRLQNPKARV | |
| | PEQRIELYQILKSKDLTSPTQRYIDSKVVKTRAEGEWLSFDVTDAVH | |
| | EWLHHKDRNLGFKISLHCPCCTFVPSNNYIIPNKSEELEARFAGIDG | |
| | TSTYTSGDQKTIKSTRKKNSGKTPHLLLMLLPSYRLESQQTNRRKK | |
| | RALDAAYCFRNVQDNCCLRPLYIDFKRDLGWKWIHEPKGYNANFC | |
| | AGACPYLWSSDTQHSRVLSLYNTINPEASASPCCVSQDLEPLTILYY | |
| | IGKTPKIEQLSNMIVKSCKCS | |
| TGF-beta 3 | SLSLSTCTTLDFGHIKKKRVEAIRGQILSKLRLTSPPEPTVMTHVPYQ | 3 |
| | VLALYNSTRELLEEMHGEREEGCTQENTESEYYAKEIHKFDMIQGL | |
| | AEHNELAVCPKGITSKVFRFNVSSVEKNRTNLFRAEFRVLRVPNPSS | |
| | KRNEQRIELFQILRPDEHIAKQRYIGGKNLPTRGTAEWLSFDVTDTV | |
| | REWLLRRESNLGLEISIHCPCHTFQPNGDILENIHEVMEIKFKGVDNE | |
| | DDHGRGDLGRLKKQKDHHNPHLILMMIPPHRLDNPGQGGQRKKR | |
| | ALDTNYCFRNLEENCCVRPLYIDFRQDLGWKWVHEPKGYYANFCS | |
| | GPCPYLRSADTTHSTVLGLYNTLNPEASASPCCVPQDLEPLTILYYV | |
| | GRTPKVEQLSNMVVKSCKCS | |
| GDF11 | AEGPAAAAAAAAAAAAAGVGGERSSRPAPSVAPEPDGCPVCVWR | 4 |
| | QHSRELRLESIKSQILSKLRLKEAPNISREVVKQLLPKAPPLQQILDL | |
| | HDFQGDALQPEDFLEEDEYHATTETVISMAQETDPAVQTDGSPLCC | |
| | HFHFSPKVMFTKVLKAQLWVYLRPVPRPATVYLQILRLKPLTGEGT | |
| | AGGGGGGRRHIRIRSLKIELHSRSGHWQSIDFKQVLHSWFRQPQSN | |
| | WGIEINAFDPSGTDLAVTSLGPGAEGLHPFMELRVLENTKRSRRNL | |
| | GLDCDEHSSESRCCRYPLTVDFEAFGWDWIIAPKRYKANYCSGQCE | |
| | YMFMQKYPHTHLVQQANPRGSAGPCCTPTKMSPINMLYFNDKQQI | |
| | IYGKIPGMVVDRCGCS | |
| Myostatin (GDF8) | NENSEQKENVEKEGLCNACTWRQNTKSSRIEAIKIQILSKLRLETAP | 5 |
| | NISKDVIRQLLPKAPPLRELIDQYDVQRDDSSDGSLEDDDYHATTET | |
| | IITMPTESDFLMQVDGKPKCCFFKFSSKIQYNKVVKAQLWIYLRPVE | |
| | TPTTVFVQILRLIKPMKDGTRYTGIRSLKLDMNPGTGIWQSIDVKTV | |
| | LQNWLKQPESNLGIEIKALDENGHDLAVTFPGPGEDGLNPFLEVKV | |
| | TDTPKRSRRDFGLDCDEHSTESRCCRYPLTVDFEAFGWDWIIAPKR | |
| | YKANYCSGECEFVFLQKYPHTHLVHQANPRGSAGPCCTPTKMSPIN | |
| | MLYFNGKEQIIYGKIPAMVVDRCGCS | |
| Inhibin-beta A | SPTPGSEGHSAAPDCPSCALAALPKDVPNSQPEMVEAVKKHILNML | 6 |
| | HLKKRPDVTQPVPKAALLNAIRKLHVGKVGENGYVEIEDDIGRRAE | |
| | MNELMEQTSEIITFAESGTARKTLHFEISKEGSDLSVVERAEVWLFL | |
| | KVPKANRTRTKVTIRLFQQQKHPQGSLDTGEEAEEVGLKGERSELL | |
| | LSEKVVDARKSTWHVFPVSSSIQRLLDQGKSSLDVRIACEQCQESG | |
| | ASLVLLGKKKKKEEEGEGKKKGGGEGGAGADEEKEQSHRPFLML | |
| | QARQSEDHPHRRRRRGLECDGKVNICCKKQFFVSFKDIGWNDWII | |
| | APSGYHANYCEGECPSHIAGTSGSSLSFHSTVINHYRMRGHSPFANL | |
| | KSCCVPTKLRPMSMLYYDDGQNIIKKDIQNMIVEECGCS | |
| Inhibin-beta B | SPTPPPTPAAPPPPPPPGSPGGSQDTCTSCGGFRRPEELGRVDGDFLE | 7 |
| | AVKRHILSRLQMRGRPNITHAVPKAAMVTALRKLHAGKVREDGRV | |
| | EIPHLDGHASPGADGQERVSEIISFAETDGLASSRVRLYFFISNEGNQ | |
| | NLFVVQASLWLYLKLLPYVLEKGSRRKVRVKVYFQEQGHGDRWN | |
| | MVEKRVDLKRSGWHTFPLTEAIQALFERGERRLNLDVQCDSCQEL | |
| | AVVPVFVDPGEESHRPFVVVQARLGDSRHRIRKRGLECDGRTNLC | |
| | CRQQFFIDFRLIGWNDWIIAPTGYYGNYCEGSCPAYLAGVPGSASSF | |
| | HTAVVNQYRMRGLNPGTVNSCCIPTKLSTMSMLYFDDEYNIVKRD | |
| | VPNMIVEECGCA | |
| Inhibin-beta C | TPRAGGQCPACGGPTLELESQRELLLDLAKRSILDKLHLTQRPTLNR | 8 |
| | PVSRAALRTALQHLHGVPQGALLEDNREQECEIISFAETGLSTINQT | |
| | RLDFHFSSDRTAGDREVQQASLMFFVQLPSNTTWTLKVRVLVLGP | |
| | HNTNLTLATQYLLEVDASGWHQLPLGPEAQAACSQGHLTLELVLE | |
| | GQVAQSSVILGGAAHRPFVAARVRVGGKHQIHRRGIDCQGGSRMC | |
| | CRQEFFVDFREIGWHDWIIQPEGYAMNFCIGQCPLHIAGMPGIAASF | |
| | HTAVLNLLKANTAAGTTGGGSCCVPTARRPLSLLYYDRDSNIVKTD | |
| | IPDMVVEACGCS | |
| Inhibin-beta E | QGTGSVCPSCGGSKLAPQAERALVLELAKQQILDGLHLTSRPRITHP | 9 |
| | PPQAALTRALRRLQPGSVAPGNGEEVISFATVTDSTSAYSSLLTFHL | |
| | STPRSHHLYHARLWLHVLPTLPGTLCLRIFRWGPRRRRQGSRTLLA | |
| | EHHITNLGWHTLTLPSSGLRGEKSGVLKLQLDCRPLEGNSTVTGQP | |
| | RRLLDTAGHQQPFLELKIRANEPGAGRARRRTPTCEPATPLCCRRD | |
| | HYVDFQELGWRDWILQPEGYQLNYCSGQCPPHLAGSPGIAASFHSA | |
| | VFSLLKANNPWPASTSCCVPTARRPLSLLYLDHNGNVVKTDVPDM | |
| | VVEACGCS | |
| Lefty1 | LTGEQLLGSLLRQLQLKEVPTLDRADMEELVIPTHVRAQYVALLQR | 10 |
| | SHGDRSRGKRFSQSFREVAGRFLALEASTHLLVFGMEQRLPPNSEL | |
| | VQAVLRLFQEPVPKAALHRHGRLSPRSARARVTVEWLRVRDDGSN | |
| | RTSLIDSRLVSVHESGWKAFDVTEAVNFWQQLSRPRQPLLLQVSVQ | |
| | REHLGPLASGAHKLVRFASQGAPAGLGEPQLELHTLDLGDYGAQG | |
| | DCDPEAPMTEGTRCCRQEMYIDLQGMKWAENWVLEPPGFLAYEC | |
| | VGTCRQPPEALAFKWPFLGPRQCIASETDSLPMIVSIKEGGRTRPQV | |
| | VSLPNMRVQKCSCASDGALVPRRLQP | |
| Lefty2 | LTEEQLLGSLLRQLQLSEVPVLDRADMEKLVIPAHVRAQYVVLLRR | 11 |
| | SHGDRSRGKRFSQSFREVAGRFLASEASTHLLVFGMEQRLPPNSEL | |
| | VQAVLRLFQEPVPKAALHRHGRLSPRSAQARVTVEWLRVRDDGSN | |
| | RTSLIDSRLVSVHESGWKAFDVTEAVNFWQQLSRPRQPLLLQVSVQ | |
| | REHLGPLASGAHKLVRFASQGAPAGLGEPQLELHTLDLRDYGAQG | |
| | DCDPEAPMTEGTRCCRQEMYIDLQGMKWAKNWVLEPPGFLAYEC | |
| | VGTCQQPPEALAFNWPFLGPRQCIASETASLPMIVSIKEGGRTRPQV | |
| | VSLPNMRVQKCSCASDGALVPRRLQP | |
| GDF15 | LSLAEASRASFPGPSELHSEDSRFRELRKRYEDLLTRLRANQSWEDS | 12 |
| | NTDLVPAPAVRILTPEVRLGSGGHLHLRISRAALPEGLPEASRLHRA | |
| | LFRLSPTASRSWDVTRPLRRQLSLARPQAPALHLRLSPPPSQSDQLL | |
| | AESSSARPQLELHLRPQAARGRRRARARNGDHCPLGPGRCCRLHT | |
| | VRASLEDLGWADWVLSPREVQVTMCIGACPSQFRAANMHAQIKTS | |
| | LHRLKPDTVPAPCCVPASYNPMVLIQKTDTGVSLQTYDDLLAKDC | |
| | HCI | |
| Anti-Mullerian | LLGTEALRAEEPAVGTSGLIFREDLDWPPGIPQEPLCLVALGGDSNG | 13 |
| hormone | SSSPLRVVGALSAYEQAFLGAVQRARWGPRDLATFGVCNTGDRQA | |
| | ALPSLRRLGAWLRDPGGQRLVVLHLEEVTWEPTPSLRFQEPPPGGA | |
| | GPPELALLVLYPGPGPEVTVTRAGLPGAQSLCPSRDTRYLVLAVDR | |
| | PAGAWRGSGLALTLQPRGEDSRLSTARLQALLFGDDHRCFTRMTP | |
| | ALLLLPRSEPAPLPAHGQLDTVPFPPPRPSAELEESPPSADPFLETLTR | |
| | LVRALRVPPARASAPRLALDPDALAGFPQGLVNLSDPAALERLLDG | |
| | EEPLLLLLRPTAATTGDPAPLHDPTSAPWATALARRVAAELQAAAA | |
| | ELRSLPGLPPATAPLLARLLALCPGGPGGLGDPLRALLLLKALQGLR | |
| | VEWRGRDPRGPGRAQRSAGATAADGPCALRELSVDLRAERSVLIP | |
| | ETYQANNCQGVCGWPQSDRNPRYGNHVVLLLKMQVRGAALARPP | |
| | CCVPTAYAGKLLISLSEERISAHHVPNMVATECGCR | |
| Inhibin-alpha | CQGLELARELVLAKVRALFLDALGPPAVTREGGDPGVRRLPRRHA | 14 |
| | LGGFTHRGSEPEEEEDVSQAILFPATDASCEDKSAARGLAQEAEEGL | |
| | FRYMFRPSQHTRSRQVTSAQLWFHTGLDRQGTAASNSSEPLLGLLA | |
| | LSPGGPVAVPMSLGHAPPHWAVLHLATSALSLLTHPVLVLLLRCPL | |
| | CTCSARPEATPFLVAHTRTRPPSGGERARRSTPLMSWPWSPSALRL | |
| | LQRPPEEPAAHANCHRVALNISFQELGWERWIVYPPSFIFHYCHGG | |
| | CGLHIPPNLSLPVPGAPPTPAQPYSLLPGAQPCCAALPGTMRPLHVR | |
| | TTSDGGYSFKYETVPNLLTQHCACI | |
| GDF1 | PVPPGPAAALLQALGLRDEPQGAPRLRPVPPVMWRLFRRRDPQETR | 15 |
| | SGSRRTSPGVTLQPCHVEELGVAGNIVRHIPDRGAPTRASEPASAAG | |
| | HCPEWTVVFDLSAVEPAERPSRARLELRFAAAAAAAPEGGWELSV | |
| | AQAGQGAGADPGPVLLRQLVPALGPPVRAELLGAAWARNASWPR | |
| | SLRLALALRPRAPAACARLAEASLLLVTLDPRLCHPLARPRRDAEP | |
| | VLGGGPGGACRARRLYVSFREVGWHRWVIAPRGFLANYCQGQCA | |
| | LPVALSGSGGPPALNHAVLRALMHAAAPGAADLPCCVPARLSPISV | |
| | LFFDNSDNVVLRQYEDMVVDECGCR | |
| GDF3 | QEYVFLQFLGLDKAPSPQKFQPVPYILKKIFQDREAAATTGVSRDLC | 16 |
| | YVKELGVRGNVLRFLPDQGFFLYPKKISQASSCLQKLLYFNLSAIKE | |
| | REQLTLAQLGLDLGPNSYYNLGPELELALFLVQEPHVWGQTTPKPG | |
| | KMFVLRSVPWPQGAVHFNLLDVAKDWNDNPRKNFGLFLEILVKED | |
| | RDSGVNFQPEDTCARLRCSLHASLLVVTLNPDQCHPSRKRRAAIPV | |
| | PKLSCKNLCHRHQLFINFRDLGWHKWIIAPKGFMANYCHGECPFSL | |
| | TISLNSSNYAFMQALMHAVDPEIPQAVCIPTKLSPISMLYQDNNDNV | |
| | ILRHYEDMVVDECGCG | |
| GDF5 | APDLGQRPQGTRPGLAKAEAKERPPLARNVFRPGGHSYGGGATNA | 17 |
| | NARAKGGTGQTGGLTQPKKDEPKKLPPRPGGPEPKPGHPPQTRQAT | |
| | ARTVTPKGQLPGGKAPPKAGSVPSSFLLKKAREPGPPREPKEPFRPP | |
| | PITPHEYMLSLYRTLSDADRKGGNSSVKLEAGLANTITSFIDKGQDD | |
| | RGPVVRKQRYVFDISALEKDGLLGAELRILRKKPSDTAKPAAPGGG | |
| | RAAQLKLSSCPSGRQPASLLDVRSVPGLDGSGWEVFDIWKLFRNFK | |
| | NSAQLCLELEAWERGRAVDLRGLGFDRAARQVHEKALFLVFGRTK | |
| | KRDLFFNEIKARSGQDDKTVYEYLFSQRRKRRAPLATRQGKRPSK | |
| | NLKARCSRKALHVNFKDMGWDDWIIAPLEYEAFHCEGLCEFPLRS | |
| | HLEPTNHAVIQTLMNSMDPESTPPTCCVPTRLSPISILFIDSANNVVY | |
| | KQYEDMVVESCGCR | |
| GDF6 | FQQASISSSSSSAELGSTKGMRSRKEGKMQRAPRDSDAGREGQEPQ | 18 |
| | PRPQDEPRAQQPRAQEPPGRGPRVVPHEYMLSIYRTYSIAEKLGINA | |
| | SFFQSSKSANTITSFVDRGLDDLSHTPLRRQKYLFDVSMLSDKEELV | |
| | GAELRLFRQAPSAPWGPPAGPLHVQLFPCLSPLLLDARTLDPQGAPP | |
| | AGWEVFDVWQGLRHQPWKQLCLELRAAWGELDAGEAEARARGP | |
| | QQPPPPDLRSLGFGRRVRPPQERALLVVFTRSQRKNLFAEMREQLG | |
| | SAEAAGPGAGAEGSWPPPSGAPDARPWLPSPGRRRRRTAFASRHG | |
| | KRHGKKSRLRCSKKPLHVNFKELGWDDWIIAPLEYEAYHCEGVCD | |
| | FPLRSHLEPTNHAIIQTLMNSMDPGSTPPSCCVPTKLTPISILYIDAGN | |
| | NVVYKQYEDMVVESCGCR | |
| GDF7 | RDGLEAAAVLRAAGAGPVRSPGGGGGGGGGGRTLAQAAGAAAVP | 19 |
| | AAAVPRARAARRAAGSGFRNGSVVPHHFMMSLYRSLAGRAPAGA | |
| | AAVSASGHGRADTITGFTDQATQDESAAETGQSFLFDVSSLNDADE | |
| | VVGAELRVLRRGSPESGPGSWTSPPLLLLSTCPGAARAPRLLYSRA | |
| | AEPLVGQRWEAFDVADAMRRHRREPRPPRAFCLLLRAVAGPVPSP | |
| | LALRRLGFGWPGGGGSAAEERAVLVVSSRTQRKESLFREIRAQARA | |
| | LGAALASEPLPDPGTGTASPRAVIGGRRRRRTALAGTRTAQGSGGG | |
| | AGRGHGRRGRSRCSRKPLHVDFKELGWDDWIIAPLDYEAYHCEGL | |
| | CDFPLRSHLEPTNHAIIQTLLNSMAPDAAPASCCVPARLSPISILYIDA | |
| | ANNVVYKQYEDMVVEACGCR | |
| BMP10 | SPIMNLEQSPLEEDMSLFGDVFSEQDGVDFNTLLQSMKDEFLKTLN | 20 |
| | LSDIPTQDSAKVDPPEYMLELYNKFATDRTSMPSANIIRSFKNEDLF | |
| | SQPVSFNGLRKYPLLFNVSIPHHEEVIMAELRLYTLVQRDRMIYDG | |
| | VDRKITIFEVLESKGDNEGERNMLVLVSGEIYGTNSEWETFDVTDAI | |
| | RRWQKSGSSTHQLEVHIESKHDEAEDASSGRLEIDTSAQNKHNPLLI | |
| | VFSDDQSSDKERKEELNEMISHEQLPELDNLGLDSFSSGPGEEALLQ | |
| | MRSNIIYDSTARIRRNAKGNYCKRTPLYIDFKEIGWDSWIIAPPGYE | |
| | AYECRGVCNYPLAEHLTPTKHAIIQALVHLKNSQKASKACCVPTKL | |
| | EPISILYLDKGVVTYKFKYEGMAVSECGCR | |
| BMP9 (GDF2) | KPLQSWGRGSAGGNAHSPLGVPGGGLPEHTFNLKMFLENVKVDFL | 21 |
| | RSLNLSGVPSQDKTRVEPPQYMIDLYNRYTSDKSTTPASNIVRSFSM | |
| | EDAISITATEDFPFQKHILLFNISIPRHEQITRAELRLYVSCQNHVDPS | |
| | HDLKGSVVIYDVLDGTDAWDSATETKTFLVSQDIQDEGWETLEVS | |
| | SAVKRWVRSDSTKSKNKLEVTVESHRKGCDTLDISVPPGSRNLPFF | |
| | VVFSNDHSSGTKETRLELREMISHEQESVLKKLSKDGSTEAGESSHE | |
| | EDTDGHVAAGSTLARRKRSAGAGSHCQKTSLRVNFEDIGWDSWII | |
| | APKEYEAYECKGGCFFPLADDVTPTKHAIVQTLVHLKFPTKVGKAC | |
| | CVPTKLSPISVLYKDDMGVPTLKYHYEGMSVAECGCR | |
| Noda1 | TVATALLRTRGQPSSPSPLAYMLSLYRDPLPRADIIRSLQAEDVAVD | 22 |
| | GQNWTFAFDFSFLSQQEDLAWAELRLQLSSPVDLPTEGSLAIEIFHQ | |
| | PKPDTEQASDSCLERFQMDLFTVTLSQVTFSLGSMVLEVTRPLSKW | |
| | LKRPGALEKQMSRVAGECWPRPPTPPATNVLLMLYSNLSQEQRQL | |
| | GGSTLLWEAESSWRAQEGQLSWEWGKRHRRHHLPDRSQLCRKVK | |
| | FQVDFNLIGWGSWIIYPKQYNAYRCEGECPNPVGEEFHPTNHAYIQ | |
| | SLLKRYQPHRVPSTCCAPVKTKPLSMLYVDNGRVLLDHHKDMIVE | |
| | ECGCL | |
| BMP2 | LVPELGRRKFAAASSGRPSSQPSDEVLSEFELRLLSMFGLKQRPTPS | 23 |
| | RDAVVPPYMLDLYRRHSGQPGSPAPDHRLERAASRANTVRSFHHE | |
| | ESLEELPETSGKTTRRFFFNLSSIPTEEFITSAELQVFREQMQDALGN | |
| | NSSFHHRINIYEIIKPATANSKFPVTRLLDTRLVNQNASRWESFDVTP | |
| | AVMRWTAQGHANHGFVVEVAHLEEKQGVSKRHVRISRSLHQDEH | |
| | SWSQIRPLLVTFGHDGKGHPLHKREKRQAKHKQRKRLKSSCKRHP | |
| | LYVDFSDVGWNDWIVAPPGYHAFYCHGECPFPLADHLNSTNHAIV | |
| | QTLVNSVNSKIPKACCVPTELSAISMLYLDENEKVVLKNYQDMVV | |
| | EGCGCR | |
| BMP4 | GASHASLIPETGKKKVAEIQGHAGGRRSGQSHELLRDFEATLLQMF | 24 |
| | GLRRRPQPSKSAVIPDYMRDLYRLQSGEEEEEQIHSTGLEYPERPAS | |
| | RANTVRSFHHEEHLENIPGTSENSAFRFLFNLSSIPENEVISSAELRLF | |
| | REQVDQGPDWERGFHRINIYEVMKPPAEVVPGHLITRLLDTRLVHH | |
| | NVTRWETFDVSPAVLRWTREKQPNYGLAIEVTHLHQTRTHQGQHV | |
| | RISRSLPQGSGNWAQLRPLLVTFGHDGRGHALTRRRRAKRSPKHH | |
| | SQRARKKNKNCRRHSLYVDFSDVGWNDWIVAPPGYQAFYCHGDC | |
| | PFPLADHLNSTNHAIVQTLVNSVNSSIPKACCVPTELSAISMLYLDE | |
| | YDKVVLKNYQEMVVEGCGCR | |
| BMP5 | DNHVHSSFIYRRLRNHERREIQREILSILGLPHRPRPFSPGKQASSAPL | 25 |
| | FMLDLYNAMTNEENPEESEYSVRASLAEETRGARKGYPASPNGYP | |
| | RRIQLSRTTPLTTQSPPLASLHDTNFLNDADMVMSFVNLVERDKDF | |
| | SHQRRHYKEFRFDLTQIPHGEAVTAAEFRIYKDRSNNRFENETIKISI | |
| | YQIIKEYTNRDADLFLLDTRKAQALDVGWLVFDITVTSNHWVINPQ | |
| | NNLGLQLCAETGDGRSINVKSAGLVGRQGPQSKQPFMVAFFKASE | |
| | VLLRSVRAANKRKNQNRNKSSSHQDSSRMSSVGDYNTSEQKQAC | |
| | KKHELYVSFRDLGWQDWIIAPEGYAAFYCDGECSFPLNAHMNATN | |
| | HAIVQTLVHLMFPDHVPKPCCAPTKLNAISVLYFDDSSNVILKKYR | |
| | NMVVRSCGCH | |
| BMP6 | CCGPPPLRPPLPAAAAAAAGGQLLGDGGSPGRTEQPPPSPQSSSGFL | 26 |
| | YRRLKTQEKREMQKEILSVLGLPHRPRPLHGLQQPQPPALRQQEEQ | |
| | QQQQQLPRGEPPPGRLKSAPLFMLDLYNALSADNDEDGASEGERQ | |
| | QSWPHEAASSSQRRQPPPGAAHPLNRKSLLAPGSGSGGASPLTSAQ | |
| | DSAFLNDADMVMSFVNLVEYDKEFSPRQRHHKEFKFNLSQIPEGEV | |
| | VTAAEFRIYKDCVMGSFKNQTFLISIYQVLQEHQHRDSDLFLLDTR | |
| | VVWASEEGWLEFDITATSNLWVVTPQHNMGLQLSVVTRDGVHVH | |
| | PRAAGLVGRDGPYDKQPFMVAFFKVSEVHVRTTRSASSRRRQQSR | |
| | NRSTQSQDVARVSSASDYNSSELKTACRKHELYVSFQDLGWQDWII | |
| | APKGYAANYCDGECSFPLNAHMNATNHAIVQTLVHLMNPEYVPKP | |
| | CCAPTKLNAISVLYFDDNSNVILKKYRNMVVRACGCH | |
| BMP7 | DFSLDNEVHSSFIHRRLRSQERREMQREILSILGLPHRPRPHLQGKH | 27 |
| | NSAPMFMLDLYNAMAVEEGGGPGGQGFSYPYKAVFSTQGPPLASL | |
| | QDSHFLTDADMVMSFVNLVEHDKEFFHPRYHHREFRFDLSKIPEGE | |
| | AVTAAEFRIYKDYIRERFDNETFRISVYQVLQEHLGRESDLFLLDSR | |
| | TLWASEEGWLVFDITATSNHWVVNPRHNLGLQLSVETLDGQSINP | |
| | KLAGLIGRHGPQNKQPFMVAFFKATEVHFRSIRSTGSKQRSQNRSK | |
| | TPKNQEALRMANVAENSSSDQRQACKKHELYVSFRDLGWQDWIIA | |
| | PEGYAAYYCEGECAFPLNSYMNATNHAIVQTLVHFINPETVPKPCC | |
| | APTQLNAISVLYFDDSSNVILKKYRNMVVRACGCH | |
| BMP8A | GGGPGLRPPPGCPQRRLGARERRDVQREILAVLGLPGRPRPRAPPA | 28 |
| | ASRLPASAPLFMLDLYHAMAGDDDEDGAPAEQRLGRADLVMSFV | |
| | NMVERDRALGHQEPHWKEFRFDLTQIPAGEAVTAAEFRIYKVPSIH | |
| | LLNRTLHVSMFQVVQEQSNRESDLFFLDLQTLRAGDEGWLVLDVT | |
| | AASDCWLLKRHKDLGLRLYVETEDGHSVDPGLAGLLGQRAPRSQQ | |
| | PFVVTFFRASPSPIRTPRAVRPLRRRQPKKSNELPQANRLPGIFDDV | |
| | RGSHGRQVCRRHELYVSFQDLGWLDWVIAPQGYSAYYCEGECSFP | |
| | LDSCMNATNHAILQSLVHLMKPNAVPKACCAPTKLSATSVLYYDS | |
| | SNNVILRKHRNMVVKACGCH | |
| BMP8B | GGGPGLRPPPGCPQRRLGARERRDVQREILAVLGLPGRPRPRAPPA | 29 |
| | ASRLPASAPLFMLDLYHAMAGDDDEDGAPAERRLGRADLVMSFV | |
| | NMVERDRALGHQEPHWKEFRFDLTQIPAGEAVTAAEFRIYKVPSIH | |
| | LLNRTLHVSMFQVVQEQSNRESDLFFLDLQTLRAGDEGWLVLDVT | |
| | AASDCWLLKRHKDLGLRLYVETEDGHSVDPGLAGLLGQRAPRSQQ | |
| | PFVVTFFRASPSPIRTPRAVRPLRRRQPKKSNELPQANRLPGIFDDV | |
| | HGSHGRQVCRRHELYVSFQDLGWLDWVIAPQGYSAYYCEGECSFP | |
| | LDSCMNATNHAILQSLVHLMMPDAVPKACCAPTKLSATSVLYYDS | |
| | SNNVILRKHRNMVVKACGCH | |
| BMP15 | MEHRAQMAEGGQSSIALLAEAPTLPLIEELLEESPGEQPRKPRLLGH | 30 |
| | SLRYMLELYRRSADSHGHPRENRTIGATMVRLVKPLTSVARPHRGT | |
| | WHIQILGFPLRPNRGLYQLVRATVVYRHHLQLTRFNLSCHVEPWV | |
| | QKNPTNHFPSSEGDSSKPSLMSNAWKEMDITQLVQQRFWNNKGHR | |
| | ILRLRFMCQQQKDSGGLELWHGTSSLDIAFLLLYFNDTHKSIRKAKF | |
| | LPRGMEEFMERESLLRRTRQADGISAEVTASSSKHSGPENNQCSLH | |
| | PFQISFRQLGWDHWIIAPPFYTPNYCKGTCLRVLRDGLNSPNHAIIQ | |
| | NLINQLVDQSVPRPSCVPYKYVPISVLMIEANGSILYKEYEGMIAES | |
| | CTCR | |
| GDF9 | SQASGGEAQIAASAELESGAMPWSLLQHIDERDRAGLLPALFKVLS | 31 |
| | VGRGGSPRLQPDSRALHYMKKLYKTYATKEGIPKSNRSHLYNTVR | |
| | LFTPCTRHKQAPGDQVTGILPSVELLFNLDRITTVEHLLKSVLLYNIN | |
| | NSVSFSSAVKCVCNLMIKEPKSSSRTLGRAPYSFTFNSQFEFGKKHK | |
| | WIQIDVTSLLQPLVASNKRSIHMSINFTCMKDQLEHPSAQNGLFNM | |
| | TLVSPSLILYLNDTSAQAYHSWYSLHYKRRPSQGPDQERSLSAYPV | |
| | GEEAAEDGRSSHHRHRRGQETVSSELKKPLGPASFNLSEYFRQFLL | |
| | PQNECELHDFRLSFSQLKWDNWIVAPHRYNPRYCKGDCPRAVGHR | |
| | YGSPVHTMVQNIIYEKLDSSVPRPSCVPAKYSPLSVLTIEPDGSIAYK | |
| | EYEDMIATKCTCR | |
| BMP3 | ERPKPPFPELRKAVPGDRTAGGGPDSELQPQDKVSEHMLRLYDRYS | 32 |
| | TVQAARTPGSLEGGSQPWRPRLLREGNTVRSFRAAAAETLERKGL | |
| | YIFNLTSLTKSENILSATLYFCIGELGNISLSCPVSGGCSHHAQRKHIQ | |
| | IDLSAWTLKFSRNQSQLLGHLSVDMAKSHRDIMSWLSKDITQLLRK | |
| | AKENEEFLIGFNITSKGRQLPKRRLPFPEPYILVYANDAAISEPESVV | |
| | SSLQGHRNFPTGTVPKWDSHIRAALSIERRKKRSTGVLLPLQNNELP | |
| | GAEYQYKKDEVWEERKPYKTLQAQAPEKSKNKKKQRKGPHRKS | |
| | QTLQFDEQTLKKARRKQWIEPRNCARRYLKVDFADIGWSEWIISPK | |
| | SFDAYYCSGACQFPMPKSLKPSNHATIQSIVRAVGVVPGIPEPCCVP | |
| | EKMSSLSILFFDENKNVVLKVYPNMTVESCACR | |
| GDF10 | SHRAPAWSALPAAADGLQGDRDLQRHPGDAAATLGPSAQDMVAV | 33 |
| | HMHRLYEKYSRQGARPGGGNTVRSFRARLEVVDQKAVYFFNLTS | |
| | MQDSEMILTATFHFYSEPPRWPRALEVLCKPRAKNASGRPLPLGPP | |
| | TRQHLLFRSLSQNTATQGLLRGAMALAPPPRGLWQAKDISPIVKAA | |
| | RRDGELLLSAQLDSEERDPGVPRPSPYAPYILVYANDLAISEPNSVA | |
| | VTLQRYDPFPAGDPEPRAAPNNSADPRVRRAAQATGPLQDNELPGL | |
| | DERPPRAHAQHFHKHQLWPSPFRALKPRPGRKDRRKKGQEVFMAA | |
| | SQVLDFDEKTMQKARRKQWDEPRVCSRRYLKVDFADIGWNEWIIS | |
| | PKSFDAYYCAGACEFPMPKIVRPSNHATIQSIVRAVGIIPGIPEPCCVP | |
| | DKMNSLGVLFLDENRNVVLKVYPNMSVDTCACR | |
| GDNF | FPLPAGKRPPEAPAEDRSLGRRRAPFALSSDSNMPEDYPDQFDDVM | 34 |
| | DFIQATIKRLKRSPDKQMAVLPRRERNRQAAAANPENSRGKGRRG | |
| | QRGKNRGCVLTAIHLNVTDLGLGYETKEELIFRYCSGSCDAAETTY | |
| | DKILKNLSRNRRLVSDKVGQACCRPIAFDDDLSFLDDNLVYHILRK | |
| | HSAKRCGCI | |
| NRTN | IWMCREGLLLSHRLGPALVPLHRLPRTLDARIARLAQYRALLQGAP | 35 |
| | DAMELRELTPWAGRPPGPRRRAGPRRRRARARLGARPCGLRELEV | |
| | RVSELGLGYASDETVLFRYCAGACEAAARVYDLGLRRLRQRRRLR | |
| | RERVRAQPCCRPTAYEDEVSFLDAHSRYHTVHELSARECACV | |
| PSPN | WGPDARGVPVADGEFSSEQVAKAGGTWLGTHRPLARLRRALSGP | 36 |
| | CQLWSLTLSVAELGLGYASEEKVIFRYCAGSCPRGARTQHGLALAR | |
| | LQGQGRAHGGPCCRPTRYTDVAFLDDRHRWQRLPQLSAAACGCG | |
| | G | |
| ARTN | SLGSAPRSPAPREGPPPVLASPAGHLPGGRTARWCSGRARRPPPQPS | 37 |
| | RPAPPPPAPPSALPRGGRAARAGGPGSRARAAGARGCRLRSQLVP | |
| | VRALGLGHRSDELVRFRFCSGSCRRARSPHDLSLASLLGAGALRPPP | |
| | GSRPVSQPCCRPTRYEAVSFMDVNSTWRTVDRLSATACGCLG | |

[0098] According to the present invention, the entire GPC, or the pro-proteins listed in Table 1, may be used as antigens. Alternatively regions of the prodomains may be used. In some embodiments, fragments generated after cleavage at furin cleavage sites may be used. In some embodiments, varients lacking one or more furin cleavage site may be used as antigens. In some embodiments, varients comprising mutated furin cleavage sites may be used as antigens. In some embodiments, regions comprising the alpha-1 helix region may be used. Table 2 lists the alpha-1 helix region of each of the prodomains. In some embodiments, mutants of any of the aforementioned may be used as antigens. Such mutants may include cysteine mutants that are incapable of binding with ECCM components including, but not limited to LTBP and GARP.

TABLE 2
Alpha-1 Regions as Antigens

| | | SEQ |
|---|---|---|
| | | ID |
| TGF Member | Alpha-1 Region Sequence | NO |
| TGF-beta 1 | LSTCKTIDMELVKRKRIEAIRGQILSKLRL | 38 |
| TGF-beta 2 | LSTCSTLDMDQFMRKRIEAIRGQILSKLKL | 39 |
| TGF-beta 3 | LSTCTTLDFGHIKKKRVEAIRGQILSKLRL | 40 |
| GDF11 | DGCPVCVWRQHSRELRLESIKSQILSKLRL | 41 |
| Myostatin | GLCNACTWRQNTKSSRIEAIKIQILSKLRL | 42 |
| (GDF8) | | |
| Inhibin-beta A | ALAALPKDVPNSQPEMVEAVKKHILNMLHL | 43 |
| Inhibin-beta B | GGFRRPEELGRVDGDFLEAVKRHILSRLQM | 44 |
| Inhibin-beta C | GGPTLELESQRELLLDLAKRSILDKLHL | 45 |
| Inhibin-beta E | GGSKLAPQAERALVLELAKQQILDGLHL | 46 |
| Lefty1 | LTGEQLLGSLLRQLQL | 47 |
| Lefty2 | LTEEQLLGSLLRQLQL | 48 |
| GDF15 | LSL | 49 |
| Anti-Mullerian | GAWLRDPGGQRLVVLHLEEVTWEPTPSLRF | 50 |
| hormone | | |
| Inhibin-alpha | CQGLELARELVLAKVRALFLDAL | 51 |
| GDF1 | PVPPGPAAALLQALGL | 52 |
| GDF3 | QEYVFLQFLGL | 53 |
| GDF5 | VTPKGQLPGGKAPPKAGSVPSSFLLKKARE | 54 |
| GDF6 | KEGKMQRAPRDSDAGREGQEPQPRPQDEPR | 55 |
| GDF7 | RAAGAGPVRSPGGGGGGGGGGRTLAQAAGA | 56 |
| BMP10 | FGDVFSEQDGVDFNTLLQSMKDEFLKTLNL | 57 |
| BMP9 (GDF2) | VPGGGLPEHTFNLKMFLENVKVDFLRSLNL | 58 |
| Noda1 | TVATALLRTRGQ | 59 |
| BMP2 | AAASSGRPSSQPSDEVLSEFELRLLSMFGL | 60 |
| BMP4 | QGHAGGRRSGQSHELLRDFEATLLQMFGL | 61 |
| BMP5 | NHVHSSFIYRRLRNHERREIQREILSILGL | 62 |
| BMP6 | PQSSSGFLYRRLKTQEKREMQKEILSVLGL | 63 |
| BMP7 | NEVHSSFIHRRLRSQERREMQREILSILGL | 64 |
| BMP8A/BMP8B | LRPPPGCPQRRLGARERRDVQREILAVLGL | 65 |
| BMP15 | HRAQMAEGGQSSIALLAEAPTLPLIEELL | 66 |
| GDF9 | AELESGAMPWSLLQHIDERDRAGLLPALFK | 67 |
| BMP3 | ERPKPPFPELRKAVPGDRTA | 68 |
| GDF10 | SHRAPAWSALPAAADGLQGDRDL | 69 |
| GDNF | FPLPAGKRPPEAPAEDRSLGR | 70 |
| NRTN | HRLGPALVPLHRLPRTLDARIARLAQYRAL | 71 |
| PSPN | WGPDA | 72 |
| ARTN | PREGPPPVLASPAGHLPGGRTARWCSGRAR | 73 |

[0099] Antibodies of the present invention, as well as antigens used to generate them, are primarily amino acid-based molecules. These molecules may be “peptides,” “polypeptides,” or “proteins.”

[0100] As used herein, the term “peptide” refers to an amino-acid based molecule having from 2 to 50 or more amino acids. Special designators apply to the smaller peptides with “dipeptide” referring to a two amino acid molecule and “tripeptide” referring to a three amino acid molecule. Amino acid based molecules having more than 50 contiguous amino acids are considered polypeptides or proteins.

[0101] The terms “amino acid” and “amino acids” refer to all naturally occurring L-alpha-amino acids as well as non-naturally occurring amino acids. Amino acids are identified by either the one-letter or three-letter designations as follows: aspartic acid (Asp:D), isoleucine (Ile:I), threonine (Thr:T), leucine (Leu:L), serine (Ser:S), tyrosine (Tyr:Y), glutamic acid (Glu:E), phenylalanine (Phe:F), proline (Pro:P), histidine (His:H), glycine (Gly:G), lysine (Lys:K), alanine (Ala:A), arginine (Arg:R), cysteine (Cys:C), tryptophan (Trp:W), valine (Val:V), glutamine (Gln:Q) methionine (Met:M), asparagines (Asn:N), where the amino acid is listed first followed parenthetically by the three and one letter codes, respectively.

### Growth Factor Directed Agents (GDAs): Variations

[0102] GDAs of the present invention may exist as a whole polypeptide, a plurality of polypeptides or fragments of polypeptides, which independently may be encoded by one or more nucleic acids, a plurality of nucleic acids, fragments of nucleic acids or variants of any of the aforementioned. As used herein, “polypeptide” means a polymer of amino acid residues (natural or unnatural) linked together most often by peptide bonds. The term, as used herein, refers to proteins, polypeptides, and peptides of any size, structure, or function. In some instances the polypeptide encoded is smaller than about 50 amino acids and the polypeptide is then termed a peptide. If the polypeptide is a peptide, it will be at least about 2, 3, 4, or at least 5 amino acid residues long. Thus, polypeptides include gene products, naturally occurring polypeptides, synthetic polypeptides, homologs, orthologs, paralogs, fragments and other equivalents, variants, and analogs of the foregoing. A polypeptide may be a single molecule or may be a multi-molecular complex such as a dimer, trimer or tetramer. They may also comprise single chain or multichain polypeptides and may be associated or linked. The term polypeptide may also apply to amino acid polymers in which one or more amino acid residues are an artificial chemical analogue of a corresponding naturally occurring amino acid.

[0103] The term “polypeptide variant” refers to molecules which differ in their amino acid sequence from a native or reference sequence. The amino acid sequence variants may possess substitutions, deletions, and/or insertions at certain positions within the amino acid sequence, as compared to a native or reference sequence. Ordinarily, variants will possess at least about 50% identity (homology) to a native or reference sequence, and preferably, they will be at least about 80%, more preferably at least about 90% identical (homologous) to a native or reference sequence.

[0104] In some embodiments “variant mimics” are provided. As used herein, the term “variant mimic” is one which contains one or more amino acids which would mimic an activated sequence. For example, glutamate may serve as a mimic for phosphoro-threonine and/or phosphoro-serine. Alternatively, variant mimics may result in deactivation or in an inactivated product containing the mimic, e.g., phenylalanine may act as an inactivating substitution for tyrosine; or alanine may act as an inactivating substitution for serine. The amino acid sequences of the GDAs of the invention may comprise naturally occurring amino acids and as such may be considered to be proteins, peptides, polypeptides, or fragments thereof. Alternatively, the GDAs may comprise both naturally and non-naturally occurring amino acids.

[0105] The term “amino acid sequence variant” refers to molecules with some differences in their amino acid sequences as compared to a native or starting sequence. The amino acid sequence variants may possess substitutions, deletions, and/or insertions at certain positions within the amino acid sequence. “Native” or “starting” sequence should not be confused with a wild type sequence. As used herein, a native or starting sequence is a relative term referring to an original molecule against which a comparison may be made. “Native” or “starting” sequences or molecules may represent the wild-type (that sequence found in nature) but do not have to be the wild-type sequence.

[0106] Ordinarily, variants will possess at least about 70% homology to a native sequence, and preferably, they will be at least about 80%, more preferably at least about 90% homologous to a native sequence.

[0107] “Homology” as it applies to amino acid sequences is defined as the percentage of residues in the candidate amino acid sequence that are identical with the residues in the amino acid sequence of a second sequence after aligning the sequences and introducing gaps, if necessary, to achieve the maximum percent homology. Methods and computer programs for the alignment are well known in the art. It is understood that homology depends on a calculation of percent identity but may differ in value due to gaps and penalties introduced in the calculation.

[0108] By “homologs” as it applies to amino acid sequences is meant the corresponding sequence of other species having substantial identity to a second sequence of a second species.

[0109] “Analogs” is meant to include polypeptide variants which differ by one or more amino acid alterations, e.g., substitutions, additions or deletions of amino acid residues that still maintain the properties of the parent polypeptide.

[0110] The term “derivative” is used synonymously with the term “variant” and refers to a molecule that has been modified or changed in any way relative to a reference molecule or starting molecule.

[0111] The present invention contemplates several types of GDAs which are amino acid based including variants and derivatives. These include substitutional, insertional, deletion and covalent variants and derivatives. As such, included within the scope of this invention are GDA molecules containing substitutions, insertions and/or additions, deletions and covalently modifications. For example, sequence tags or amino acids, such as one or more lysines, can be added to the peptide sequences of the invention (e.g., at the N-terminal or C-terminal ends). Sequence tags can be used for peptide purification or localization. Lysines can be used to increase peptide solubility or to allow for biotinylation. Alternatively, amino acid residues located at the carboxy and amino terminal regions of the amino acid sequence of a peptide or protein may optionally be deleted providing for truncated sequences. Certain amino acids (e.g., C-terminal or N-terminal residues) may alternatively be deleted depending on the use of the sequence, as for example, expression of the sequence as part of a larger sequence which is soluble, or linked to a solid support.

[0112] “Substitutional variants” when referring to proteins are those that have at least one amino acid residue in a native or starting sequence removed and a different amino acid inserted in its place at the same position. The substitutions may be single, where only one amino acid in the molecule has been substituted, or they may be multiple, where two or more amino acids have been substituted in the same molecule.

[0113] As used herein the term “conservative amino acid substitution” refers to the substitution of an amino acid that is normally present in the sequence with a different amino acid of similar size, charge, or polarity. Examples of conservative substitutions include the substitution of a non-polar (hydrophobic) residue such as isoleucine, valine and leucine for another non-polar residue. Likewise, examples of conservative substitutions include the substitution of one polar (hydrophilic) residue for another such as between arginine and lysine, between glutamine and asparagine, and between glycine and serine. Additionally, the substitution of a basic residue such as lysine, arginine or histidine for another, or the substitution of one acidic residue such as aspartic acid or glutamic acid for another acidic residue are additional examples of conservative substitutions. Examples of non-conservative substitutions include the substitution of a non-polar (hydrophobic) amino acid residue such as isoleucine, valine, leucine, alanine, methionine for a polar (hydrophilic) residue such as cysteine, glutamine, glutamic acid or lysine and/or a polar residue for a non-polar residue.

[0114] “Insertional variants” when referring to proteins are those with one or more amino acids inserted immediately adjacent to an amino acid at a particular position in a native or starting sequence. “Immediately adjacent” to an amino acid means connected to either the alpha-carboxy or alpha-amino functional group of the amino acid.

[0115] “Deletional variants” when referring to proteins, are those with one or more amino acids in the native or starting amino acid sequence removed. Ordinarily, deletional variants will have one or more amino acids deleted in a particular region of the molecule.

[0116] The term “derivatives,” as referred to herein includes modifications of a native or starting protein with an organic proteinaceous or non-proteinaceous derivatizing agent, and post-translational modifications. Covalent modifications are traditionally introduced by reacting targeted amino acid residues of the protein with an organic derivatizing agent that is capable of reacting with selected side-chains or terminal residues, or by harnessing mechanisms of post-translational modifications that function in selected recombinant host cells. The resultant covalent derivatives are useful in programs directed at identifying residues important for biological activity, for immunoassays, or for the preparation of anti-protein antibodies for immunoaffinity purification of the recombinant glycoprotein. Such modifications are within the ordinary skill in the art and are performed without undue experimentation.

[0117] Certain post-translational modifications are the result of the action of recombinant host cells on the expressed polypeptide. Glutaminyl and asparaginyl residues are frequently post-translationally deaminated to the corresponding glutamyl and aspartyl residues. Alternatively, these residues are deaminated under mildly acidic conditions. Either form of these residues may be present in the proteins used in accordance with the present invention.

[0118] Other post-translational modifications include hydroxylation of proline and lysine, phosphorylation of hydroxyl groups of seryl or threonyl residues, methylation of the alpha-amino groups of lysine, arginine, and histidine side chains (T. E. Creighton, Proteins: Structure and Molecular Properties, W.H. Freeman & Co., San Francisco, pp. 79-86 (1983)).

[0119] Covalent derivatives specifically include fusion molecules in which proteins of the invention are covalently bonded to a non-proteinaceous polymer. The non-proteinaceous polymer ordinarily is a hydrophilic synthetic polymer, i.e. a polymer not otherwise found in nature. However, polymers which exist in nature and are produced by recombinant or in vitro methods are useful, as are polymers which are isolated from nature. Hydrophilic polyvinyl polymers fall within the scope of this invention, e.g. polyvinylalcohol and polyvinylpyrrolidone. Particularly useful are polyvinylalkylene ethers such a polyethylene glycol, polypropylene glycol. The proteins may be linked to various non-proteinaceous polymers, such as polyethylene glycol, polypropylene glycol or polyoxyalkylenes, in the manner set forth in U.S. Pat. Nos. 4,640,835; 4,496,689; 4,301,144; 4,670,417; 4,791,192 or 4,179,337.

[0120] “Features” when referring to proteins are defined as distinct amino acid sequence-based components of a molecule. Features of the proteins of the present invention include surface manifestations, local conformational shape, folds, loops, half-loops, domains, half-domains, sites, termini or any combination thereof.

[0121] As used herein when referring to proteins the term “surface manifestation” refers to a polypeptide based component of a protein appearing on an outermost surface.

[0122] As used herein when referring to proteins the term “local conformational shape” means a polypeptide based structural manifestation of a protein which is located within a definable space of the protein.

[0123] As used herein when referring to proteins the term “fold” means the resultant conformation of an amino acid sequence upon energy minimization. A fold may occur at the secondary or tertiary level of the folding process. Examples of secondary level folds include beta sheets and alpha helices. Examples of tertiary folds include domains and regions formed due to aggregation or separation of energetic forces. Regions formed in this way include hydrophobic and hydrophilic pockets, and the like.

[0124] As used herein the term “turn” as it relates to protein conformation means a bend which alters the direction of the backbone of a peptide or polypeptide and may involve one, two, three or more amino acid residues.

[0125] As used herein when referring to proteins the term “loop” refers to a structural feature of a peptide or polypeptide which reverses the direction of the backbone of a peptide or polypeptide and comprises four or more amino acid residues. Oliva et al. have identified at least 5 classes of protein loops (J. Mol Biol 266 (4): 814-830; 1997).

[0126] As used herein when referring to proteins the term “half-loop” refers to a portion of an identified loop having at least half the number of amino acid resides as the loop from which it is derived. It is understood that loops may not always contain an even number of amino acid residues. Therefore, in those cases where a loop contains or is identified to comprise an odd number of amino acids, a half-loop of the odd-numbered loop will comprise the whole number portion or next whole number portion of the loop (number of amino acids of the loop/2+/−0.5 amino acids). For example, a loop identified as a 7 amino acid loop could produce half-loops of 3 amino acids or 4 amino acids (7/2=3.5+/−0.5 being 3 or 4).

[0127] As used herein when referring to proteins the term “domain” refers to a motif of a polypeptide having one or more identifiable structural or functional characteristics or properties (e.g., binding capacity, serving as a site for protein-protein interactions.

[0128] As used herein when referring to proteins the term “half-domain” means portion of an identified domain having at least half the number of amino acid resides as the domain from which it is derived. It is understood that domains may not always contain an even number of amino acid residues. Therefore, in those cases where a domain contains or is identified to comprise an odd number of amino acids, a half-domain of the odd-numbered domain will comprise the whole number portion or next whole number portion of the domain (number of amino acids of the domain/2+/−0.5 amino acids). For example, a domain identified as a 7 amino acid domain could produce half-domains of 3 amino acids or 4 amino acids (7/2=3.5+/−0.5 being 3 or 4). It is also understood that sub-domains may be identified within domains or half-domains, these subdomains possessing less than all of the structural or functional properties identified in the domains or half domains from which they were derived. It is also understood that the amino acids that comprise any of the domain types herein need not be contiguous along the backbone of the polypeptide (i.e., nonadjacent amino acids may fold structurally to produce a domain, half-domain or subdomain).

[0129] As used herein when referring to proteins the terms “site” as it pertains to amino acid based embodiments is used synonymous with “amino acid residue” and “amino acid side chain”. A site represents a position within a peptide or polypeptide that may be modified, manipulated, altered, derivatized or varied within the polypeptide based molecules of the present invention.

[0130] As used herein the terms “termini or terminus” when referring to proteins refers to an extremity of a peptide or polypeptide. Such extremity is not limited only to the first or final site of the peptide or polypeptide but may include additional amino acids in the terminal regions. The polypeptide based molecules of the present invention may be characterized as having both an N-terminus (terminated by an amino acid with a free amino group (NH2)) and a C-terminus (terminated by an amino acid with a free carboxyl group (COOH)). Proteins of the invention are in some cases made up of multiple polypeptide chains brought together by disulfide bonds or by non-covalent forces (multimers, oligomers). These sorts of proteins will have multiple N- and C-termini. Alternatively, the termini of the polypeptides may be modified such that they begin or end, as the case may be, with a non-polypeptide based moiety such as an organic conjugate.

[0131] Once any of the features have been identified or defined as a component of a molecule of the invention, any of several manipulations and/or modifications of these features may be performed by moving, swapping, inverting, deleting, randomizing or duplicating. Furthermore, it is understood that manipulation of features may result in the same outcome as a modification to the molecules of the invention. For example, a manipulation which involved deleting a domain would result in the alteration of the length of a molecule just as modification of a nucleic acid to encode less than a full length molecule would.

[0132] Modifications and manipulations can be accomplished by methods known in the art such as site directed mutagenesis. The resulting modified molecules may then be tested for activity using in vitro or in vivo assays such as those described herein or any other suitable screening assay known in the art.

### Isotopic Variations

[0133] The GDAs of the present invention may contain one or more atoms that are isotopes. As used herein, the term “isotope” refers to a chemical element that has one or more additional neutron. In one embodiment, compounds of the present invention may be deuterated. As used herein, the term “deuterated” refers to a substance that has had one or more hydrogen atoms replaced by deuterium isotopes. Deuterium isotopes are isotopes of hydrogen. The nucleus of hydrogen contains one proton while deuterium nuclei contain both a proton and a neutron. The GDAs may be deuterated in order to change a physical property of the compound, such as stability, or to allow the compounds to be used in diagnostic and experimental applications.

### Growth Factor Directed Agents (GDAs): Conjugates and Combinations

[0134] It is contemplated by the present invention that the GDAs, antigens and/or antibodies of the present invention may be complexed, conjugated or combined with one or more homologous or heterologous molecules. As used herein, “homologous molecule” means a molecule which is similar in at least one of structure or function relative to a starting molecule while a “heterologous molecule” is one that differs in at least one of structure or function relative to a starting molecule. Structural homologs are therefore molecules which are substantially structurally similar. They can be identical. Functional homologs are molecules which are substantially functionally similar. They can be identical.

[0135] GDAs of the invention may comprise conjugates. Such conjugates of the invention may include a naturally occurring substance or ligand, such as a protein (e.g., human serum albumin (HSA), low-density lipoprotein (LDL), high-density lipoprotein (HDL), or globulin); an carbohydrate (e.g., a dextran, pullulan, chitin, chitosan, inulin, cyclodextrin or hyaluronic acid); or a lipid. The ligand may also be a recombinant or synthetic molecule, such as a synthetic polymer, e.g., a synthetic polyamino acid, an oligonucleotide (e.g. an aptamer). Examples of polyamino acids include polyamino acid is a polylysine (PLL), poly L-aspartic acid, poly L-glutamic acid, styrene-maleic acid anhydride copolymer, poly(L-lactide-co-glycolied) copolymer, divinyl ether-maleic anhydride copolymer, N-(2-hydroxypropyl)methacrylamide copolymer (HMPA), polyethylene glycol (PEG), polyvinyl alcohol (PVA), polyurethane, poly(2-ethylacryllic acid), N-isopropylacrylamide polymers, or polyphosphazine. Example of polyamines include: polyethylenimine, polylysine (PLL), spermine, spermidine, polyamine, pseudopeptide-polyamine, peptidomimetic polyamine, dendrimer polyamine, arginine, amidine, protamine, cationic lipid, cationic porphyrin, quaternary salt of a polyamine, or an alpha helical peptide.

[0136] The conjugates can also include targeting groups, e.g., a cell or tissue targeting agent or group, e.g., a lectin, glycoprotein, lipid or protein, e.g., an antibody, that binds to a specified cell type such as a kidney cell. A targeting group can be a thyrotropin, melanotropin, lectin, glycoprotein, surfactant protein A, mucin carbohydrate, multivalent lactose, multivalent galactose, N-acetyl-galactosamine, N-acetyl-gulucosamine multivalent mannose, multivalent fucose, glycosylated polyaminoacids, multivalent galactose, transferrin, bisphosphonate, polyglutamate, polyaspartate, a lipid, cholesterol, a steroid, bile acid, folate, vitamin B12, biotin, an RGD peptide, an RGD peptide mimetic or an aptamer.

[0137] Targeting groups can be proteins, e.g., glycoproteins, or peptides, e.g., molecules having a specific affinity for a co-ligand, or antibodies e.g., an antibody, that binds to a specified cell type such as a cancer cell, endothelial cell, or bone cell. Targeting groups may also include hormones and hormone receptors. They can also include non-peptidic species, such as lipids, lectins, carbohydrates, vitamins, cofactors, multivalent lactose, multivalent galactose, N-acetyl-galactosamine, N-acetyl-gulucosamine multivalent mannose, multivalent fucose, or aptamers.

[0138] The targeting group can be any ligand that is capable of targeting a specific receptor. Examples include, without limitation, folate, GalNAc, galactose, mannose, mannose-6P, apatamers, integrin receptor ligands, chemokine receptor ligands, transferrin, biotin, serotonin receptor ligands, PSMA, endothelin, GCPII, somatostatin, LDL, and HDL ligands. In particular embodiments, the targeting group is an aptamer. The aptamer can be unmodified or have any combination of modifications disclosed herein.

[0139] In still other embodiments, the GDA is covalently conjugated to a cell penetrating polypeptide. The cell-penetrating peptide may also include a signal sequence. The conjugates of the invention can be designed to have increased stability; increased cell transfection; and/or altered the biodistribution (e.g., targeted to specific tissues or cell types).

[0140] Conjugating moieties may be added to the GDA antibodies such that they allow labeling or flagging the GPC for clearance. Such tagging/flagging molecules include, but are not limited to ubiquitin, fluorescent molecules, human influenza hemaglutinin (HA), c-myc (a 10 amino acid segment of the human protooncogene myc with sequence EQKLISEEDL (SEQ ID NO: 317)), histidine (His), flag (a short peptide of sequence DYKDDDDK (SEQ ID NO: 318)), glutathione S-transferase (GST), V5 (a paramyxovirus of simian virus 5 epitope), biotin, avidin, streptavidin, horse radish peroxidase (HRP) and digoxigenin.

[0141] In some embodiments, GDAs may be combined with other GDAs, GPCs, GPC modulatory factors or other molecule in the treatment of a disease or condition. Such combinations may hasten or slow the release of a growth factor from a natural depot or from a GPC (including any GPC administered in combination with a GDA of the invention).

### Growth Factor Directed Agents: Antibodies, Manufacture

[0142] Antibodies of the present invention may be polyclonal or monoclonal or recombinant, produced by methods known in the art or as described in this application.

[0143] In some embodiments, the antibodies of the present invention may be labeled for purposes of detection with a detectable label known by one of skill in the art. The label can be a radioisotope, fluorescent compound, chemiluminescent compound, enzyme, or enzyme co-factor, or any other labels known in the art. In some aspects, the antibody that binds to a desired antigen is not labeled, but may be detected by binding of a labeled secondary antibody that specifically binds to the primary antibody.

[0144] Antibodies of the present invention include, but are not limited to, polyclonal, monoclonal, multispecific, human, humanized or chimeric antibodies, single chain antibodies, Fab fragments, F(ab′) fragments, fragments produced by a Fab expression library, anti-idiotypic (anti-Id) antibodies (including, e.g., anti-Id antibodies to antibodies of the invention), intracellularly made antibodies (i.e., intrabodies), and epitope-binding fragments of any of the above. Antibodies of the present invention can be from any animal origin including birds and mammals. Preferably, such antibodies are of human, murine (e.g., mouse and rat), donkey, sheep, rabbit, goat, guinea pig, camel, horse, or chicken origin. The antibodies of the present invention can be monospecific or multispecific (e.g., bispecific, trispecific, or of greater multispecificity). Multispecific antibodies can be specific for different epitopes of a peptide of the present invention, or can be specific for both a peptide of the present invention, and a heterologous epitope, such as a heterologous peptide or solid support material. (See, e.g., WO 93/17715; WO 92/08802; WO 91/00360; WO 92/05793; Tutt, A. et al., Trispecific F(ab)3 derivatives that use cooperative signaling via the TCR/CD3 complex and CD2 to activate and redirect resting cytotoxic T cells. J Immunol. 1991 Jul. 1; 147(1):60-9; U.S. Pat. Nos. 4,474,893; 4,714,681; 4,925,648; 5,573,920; 5,601,819; and Kostelny, S. A. et al., Formation of a bispecific antibody by the use of leucine zippers. J Immunol. 1992 Mar. 1; 148(5):1547-53). For example, the antibodies may be produced against a peptide containing repeated units of a peptide sequence of the present invention, or they may be produced against a peptide containing two or more peptide sequences of the present invention, or the combination thereof.

[0145] In some embodiments, antibodies can be prepared from any region of the proteins or peptides taught herein, for example prodomains or regions thereof. In addition, if a polypeptide is a receptor protein, e.g., a TGF-beta receptor, antibodies can be developed against (e.g., to target, bind or interact with) an entire receptor or portions of the receptor, for example, an intracellular domain, an extracellular domain, the entire transmembrane domain, specific transmembrane segments, any of the intracellular or extracellular loops, or any portions of these regions. Antibodies can also be developed against specific functional sites, such as the site of ligand binding, or sites that are glycosylated, phosphorylated, myristylated, or amidated, for example.

[0146] In the present invention, the peptides for generating antibodies preferably contain a sequence of at least 4, at least 5, at least 6, at least 7, more preferably at least 8, at least 9, at least 10, at least 11, at least 12, at least 13, at least 14, at least 15, and, preferably, between about 5 to about 50 amino acids in length, more preferably between about 10 to about 30 amino acids in length, even more preferably between about 10 to about 20 amino acids in length.

[0147] In the present invention, where larger polypeptides or proteins are used for generating antibodies, these preferably are at least 50, at least 55, at least 60, at least 70, at least 80, at least 90, or more amino acids in length.

[0148] Monoclonal antibodies of the present invention can be prepared using well-established methods known by those skilled in the art. In one embodiment, the monoclonal antibodies are prepared using hybridoma technology (Kohler, G. et al., Continuous cultures of fused cells secreting antibody of predefined specificity. Nature. 1975 Aug. 7; 256(5517):495-7). In a hybridoma method, a mouse, hamster, or other appropriate host animal, is typically immunized with an immunizing agent (e.g., a peptide of the invention) to elicit lymphocytes that produce or are capable of producing antibodies that will specifically bind to the immunizing agent. Alternatively, the lymphocytes may be immunized in vitro. The lymphocytes are then fused with an immortalized cell line using a suitable fusing agent, such as polyethylene glycol, to form a hybridoma cell (Goding, J. W., Monoclonal Antibodies: Principles and Practice. Academic Press. 1986; 59-1031). Immortalized cell lines are usually transformed mammalian cells, particularly myeloma cells of rodent, rabbit, bovine and human origin. Usually, rat or mouse myeloma cell lines are employed. The hybridoma cells may be cultured in a suitable culture medium that preferably contains one or more substances that inhibit the growth or survival of the unfused, immortalized cells. For example, if the parental cells lack the enzyme hypoxanthine guanine phosphoribosyl transferase (HGPRT or HPRT), the culture medium for the hybridomas typically will include hypoxanthine, aminopterin, and thymidine (“HAT medium”), which substances prevent the growth of HGPRT-deficient cells.

[0149] Preferred immortalized cell lines are those that fuse efficiently, support stable high level expression of antibody by the selected antibody-producing cells, and are sensitive to a medium such as HAT medium. More preferred immortalized cell lines are murine myeloma lines, which can be obtained, for instance, from the Salk Institute Cell Distribution Center, San Diego, Calif. and the American Type Culture Collection, Manassas, Va. Human myeloma and mouse-human heteromyeloma cell lines also have been described for the production of human monoclonal antibodies (Kozbor, D. et al., A human hybrid myeloma for production of human monoclonal antibodies. J Immunol. 1984 December; 133(6):3001-5; Brodeur, B. et al., Monoclonal Antibody Production Techniques and Applications. Marcel Dekker, Inc., New York. 1987; 33:51-63).

[0150] The culture medium in which the hybridoma cells are cultured can then be assayed for the presence of monoclonal antibodies. Preferably, the binding specificity (i.e., specific immunoreactivity) of monoclonal antibodies produced by the hybridoma cells is determined by immunoprecipitation or by an in vitro binding assay, such as radioimmunoassay (RIA) or enzyme-linked immunosorbent assay (ELISA). Such techniques and assays are known by those skilled in the art. The binding specificity of the monoclonal antibody can, for example, be determined by Scatchard analysis (Munson, P. J. et al., Ligand: a versatile computerized approach for characterization of ligand-binding systems. Anal Biochem. 1980 Sep. 1; 107(1):220-39).

[0151] After the desired hybridoma cells are identified, the clones may be subcloned by limiting dilution procedures and grown by standard methods. Suitable culture media for this purpose include, for example, Dulbecco's Modified Eagle's Medium or RPMI-1640 medium. Alternatively, the hybridoma cells may be grown in vivo as ascites in a mammal.

[0152] The monoclonal antibodies secreted by the subclones may be isolated or purified from the culture medium or ascites fluid by conventional immunoglobulin purification procedures such as, for example, protein A-Sepharose, hydroxylapatite chromatography, gel electrophoresis, dialysis, or affinity chromatography.

[0153] In another embodiment, the monoclonal antibodies of the present invention can also be made by recombinant DNA methods, such as those described in U.S. Pat. No. 4,816,567, which is hereby incorporated by reference in its entirety. DNA encoding the monoclonal antibodies of the invention can be readily isolated and sequenced using conventional procedures (e.g., by using oligonucleotide probes that are capable of binding specifically to genes encoding the heavy and light chains of murine antibodies). The hybridoma cells of the invention serve as a preferred source of DNA. Once isolated, the DNA can be placed into expression vectors, which are then transfected into host cells such as simian COS cells, Chinese hamster ovary (CHO) cells, or myeloma cells that do not otherwise produce immunoglobulin protein, to obtain the synthesis of monoclonal antibodies in the recombinant host cells. The DNA also can be modified, for example, by substituting the coding sequence for human heavy and light chain constant domains in place of the homologous murine sequences (U.S. Pat. No. 4,816,567) or by covalently joining to the immunoglobulin coding sequence all or part of the coding sequence for a non-immunoglobulin polypeptide. Such a non-immunoglobulin polypeptide can be substituted for the constant domains of an antibody of the invention, or can be substituted for the variable domains of one antigen-combining site of an antibody of the invention to create a chimeric bivalent antibody.

[0154] In another embodiment, antibodies of the present invention can also be produced by various procedures known by those skilled in the art. For the production of polyclonal antibodies in vivo, host animals, such as rabbits, rats, mice, sheep, or goats, are immunized with either free or carrier-coupled peptides, for example, by intraperitoneal and/or intradermal injection. Injection material is typically an emulsion containing about 100 μg of peptide or carrier protein. Various adjuvants can also be used to increase the immunological response, depending on the host species. Adjuvants include, but are not limited to, Freund's (complete and incomplete), mineral gels such as aluminum hydroxide, surface active substances such as lysolecithin, pluronic polyols, polyanions, peptides, oil emulsions, keyhole limpet hemocyanins, dinitrophenol, and potentially useful human adjuvants such as BCG (bacille Calmette-Guerin) and corynebacterium parvum. Such adjuvants are also well known in the art. Several booster injections may be needed, for instance, at intervals of about two weeks, to provide a useful titer of antibody which can be detected, for example, by ELISA assay using free peptide adsorbed to a solid surface. The titer of antibodies in serum from an immunized animal can be increased by selection of antibodies, e.g., by adsorption of the peptide onto a solid support and elution of the selected antibodies according to methods well known in the art.

[0155] GDAs comprising antibodies, variants and fragments thereof may be selected and produced using high throughput methods of discovery. In one embodiment, GDAs comprising synthetic antibodies, variants and fragments thereof are produced through the use of display libraries. The term “display” as used herein, refers to the expression or “display” of proteins or peptides on the surface of a given host. The term “library” as used herein, refers to a collection of unique cDNA sequences. A library may contain from as little as two unique cDNAs to hundreds of billions of unique cDNAs. In a preferred embodiment, GDAs comprising synthetic antibodies are produced using antibody display libraries or antibody fragment display libraries. The term “antibody fragment display library” as used herein, refers to a display library wherein each member encodes an antibody fragment containing at least one variable region of an antibody. Such antibody fragments are preferably Fab fragments, but other antibody fragments such as single-chain variable fragments (scFvs) are contemplated as well. In an Fab antibody fragment library, each Fab encoded may be identical except for the amino acid sequence contained within the variable loops of the complementarity determining regions (CDRs) of the Fab fragment. In an alternative or additional embodiment, amino acid sequences within the individual V_{H} and/or V_{L} regions may differ as well.

[0156] Display libraries may be expressed in a number of possible hosts including, but not limited to yeast, bacteriophage, bacteria and retroviruses. Additional display technologies that may be used include ribosome-display, microbead-display and protein-DNA linkage techniques. In a preferred embodiment, Fab display libraries are expressed in yeast or in bacteriophages (also referred to herein as “phages” or “phage particles”. When expressed, the Fabs decorate the surface of the phage or yeast where they can interact with a given antigen. An antigen comprising a GPC, growth factor, or an antigen from a desired target site may be used to select phage particles or yeast cells expressing antibody fragments with the highest affinity for that antigen. The DNA sequence encoding the CDR of the bound antibody fragment can then be determined through sequencing using the bound particle or cell. In one embodiment, positive selection is used in the development of antibodies. As used herein, the term “positive selection” refers to processes by which antibodies and/or fragments thereof are selected from display libraries based on affinity for antigens containing target sites. In some embodiments, negative selection is utilized in the development of antibodies. As used herein, the term “negative selection” refers to processes by which antigens that lack target sites for antibody production are used to exclude antibodies and/or fragments thereof from a given display library during antibody development. In some embodiments, both positive and negative selection are utilized during multiple rounds of selection in the development of antibodies using display libraries.

[0157] In yeast display, cDNA encoding different antibody fragments are introduced into yeast cells where they are expressed and the antibody fragments are “displayed” on the cell surface as described by Chao et al. (Chao, G. et al., Isolating and engineering human antibodies using yeast surface display. Nat Protoc. 2006; 1(2):755-68). In yeast surface display, expressed antibody fragments contain an additional domain comprising the yeast agglutinin protein, Aga2p. This domain allows the antibody fragment fusion protein to attach to the outer surface of the yeast cell through the formation of disulphide bonds with surface-expressed Aga1p. The result is a yeast cell, coated in a particular antibody fragment. Display libraries of cDNA encoding these antibody fragments are utilized initially in which the antibody fragments each have a unique sequence. These fusion proteins are expressed on the cell surface of millions of yeast cells where they can interact with a desired antigenic target peptide, incubated with the cells. Target peptides may be covalently or otherwise modified with a chemical or magnetic group to allow for efficient cell sorting after successful binding with a suitable antibody fragment takes place. Recovery may be by way of magnetic-activated cell sorting (MACS), fluorescence-activated cell sorting (FACS) or other cell sorting methods known in the art. Once a subpopulation of yeast cells is selected, the corresponding plasmids may be analyzed to determine the CDR sequence.

[0158] Bacteriophage display methods typically utilize filamentous phage including fd, F1 and M13 virions. Such strains are non-lytic, allowing for continued propagation of the host and increased viral titres. Examples of phage display methods that can be used to make the antibodies of the present invention include those disclosed in Miersch et al. (Miersch, S. et al., Synthetic antibodies: Concepts, potential and practical considerations. Methods. 2012 August; 57(4):486-98), Bradbury et al. (Bradbury, A. R. et al., Beyond natural antibodies: the power of in vitro display technologies. Nat Biotechnol. 2011 March; 29(3):245-54), Brinkman et al. (Brinkmann, U. et al., Phage display of disulfide-stabilized Fv fragments. J Immunol Methods. 1995 May 11; 182(1):41-50); Ames et al. (Ames, R. S. et al., Conversion of murine Fabs isolated from a combinatorial phage display library to full length immunoglobulins. J Immunol Methods. 1995 Aug. 18; 184(2):177-86); Kettleborough et al. (Kettleborough, C. A. et al., Isolation of tumor cell-specific single-chain Fv from immunized mice using phage-antibody libraries and the re-construction of whole antibodies from these antibody fragments. Eur J Immunol. 1994 April; 24(4):952-8); Persic et al. (Persic, L. et al., An integrated vector system for the eukaryotic expression of antibodies or their fragments after selection from phage display libraries. Gene. 1997 Mar. 10; 187(1):9-18.); PCT application No. PCT/GB91/01134; PCT publications WO 90/02809; WO 91/10737; WO 92/01047; WO 92/18619; WO 93/11236; WO 95/15982; WO 95/20401; and U.S. Pat. Nos. 5,698,426; 5,223,409; 5,403,484; 5,580,717; 5,427,908; 5,750,753; 5,821,047; 5,571,698; 5,427,908; 5,516,637; 5,780,225; 5,658,727; 5,733,743 and 5,969,108, each of which is incorporated herein by reference in its entirety. Antibody fragment expression on bacteriophages may be carried out by inserting the cDNA encoding the fragment into the gene expressing a viral coat protein. The viral coat of filamentous bacteriophages is made up of five coat proteins, encoded by a single-stranded genome. Coat protein pIII is the preferred protein for antibody fragment expression, typically at the N-terminus. If antibody fragment expression compromises the function of pIII, viral function may be restored through coexpression of a wild type pIII, although such expression will reduce the number of antibody fragments expressed on the viral coat, but may enhance access to the antibody fragment by the target antigen. Expression of viral as well as antibody fragment proteins may alternatively be encoded on multiple plasmids. This method may be used to reduce the overall size of infective plasmids and enhance the transformation efficiency.

[0159] As described above, after selection of a host expressing a high affinity antibody or antibody fragment, the coding regions from the antibody or antibody fragment can be isolated and used to generate whole antibodies, including human antibodies, or any other desired antigen binding fragment, and expressed in any desired host, including mammalian cells, insect cells, plant cells, yeast, and bacteria, e.g., as described in detail below.

[0160] The DNA sequence encoding a high affinity antibody can be mutated for additional rounds of selection in a process known as affinity maturation. The term “affinity maturation”, as used herein, refers to a method whereby antibodies are produced with increasing affinity for a given antigen through successive rounds of mutation and selection of antibody- or antibody fragment-encoding cDNA sequences. In a preferred embodiment, this process is carried out in vitro. To accomplish this, amplification of CDR coding sequences may be carried out using error-prone PCR to produce millions of copies containing mutations including, but not limited to point mutations, regional mutations, insertional mutations and deletional mutations. As used herein, the term “point mutation” refers to a nucleic acid mutation in which one nucleotide within a nucleotide sequence is changed to a different nucleotide. As used herein, the term “regional mutation” refers to a nucleic acid mutation in which two or more consecutive nucleotides are changed to different nucleotides. As used herein, the term “insertional mutation” refers to a nucleic acid mutation in which one or more nucleotides are inserted into a nucleotide sequence. As used herein, the term “deletional mutation” refers to a nucleic acid mutation in which one or more nucleotides are removed from a nucleotide sequence. Insertional or deletional mutations may include the complete replacement of an entire codon or the change of one codon to another by altering one or two nucleotides of the starting codon.

[0161] Mutagenesis may be carried out on CDR-encoding cDNA sequences to create millions of mutants with singular mutations in CDR heavy and light chain regions. In another approach, random mutations are introduced only at CDR residues most likely to improve affinity. These newly generated mutagenic libraries can be used to repeat the process to screen for clones that encode antibody fragments with even higher affinity for the target peptide. Continued rounds of mutation and selection promote the synthesis of clones with greater and greater affinity (Chao, G. et al., Isolating and engineering human antibodies using yeast surface display. Nat Protoc. 2006; 1(2):755-68).

[0162] Examples of techniques that can be used to produce antibodies and antibody fragments, such as Fabs and scFvs, include those described in U.S. Pat. Nos. 4,946,778 and 5,258, 498; Miersch et al. (Miersch, S. et al., Synthetic antibodies: Concepts, potential and practical considerations. Methods. 2012 August; 57(4):486-98), Chao et al. (Chao, G. et al., Isolating and engineering human antibodies using yeast surface display. Nat Protoc. 2006; 1(2):755-68), Huston et al. (Huston, J. S. et al., Protein engineering of single-chain Fv analogs and fusion proteins. Methods Enzymol. 1991; 203:46-88); Shu et al. (Shu, L. et al., Secretion of a single-gene-encoded immunoglobulin from myeloma cells. Proc Natl Acad Sci USA. 1993 Sep. 1; 90(17):7995-9); and Skerra et al. (Skerra, A. et al., Assembly of a functional immunoglobulin Fv fragment in Escherichia coli. Science. 1988 May 20; 240(4855):1038-41), each of which is incorporated herein by reference in its entirety.

[0163] For some uses, including the in vivo use of antibodies in humans and in vitro detection assays, it may be preferable to use chimeric, humanized, or human antibodies. A chimeric antibody is a molecule in which different portions of the antibody are derived from different animal species, such as antibodies having a variable region derived from a murine monoclonal immunoglobulin and a human immunoglobulin constant region. Methods for producing chimeric antibodies are known in the art. (Morrison, S. L., Transfectomas provide novel chimeric antibodies. Science. 1985 Sep. 20; 229(4719):1202-7; Gillies, S. D. et al., High-level expression of chimeric antibodies using adapted cDNA variable region cassettes. J Immunol Methods. 1989 Dec. 20; 125(1-2):191-202.; and U.S. Pat. Nos. 5,807,715; 4,816,567; and 4,816,397, which are incorporated herein by reference in their entirety). Humanized antibodies are antibody molecules from non-human species that bind to the desired antigen and have one or more complementarity determining regions (CDRs) from the nonhuman species and framework regions from a human immunoglobulin molecule. Often, framework residues in the human framework regions are substituted with corresponding residues from the CDR and framework regions of the donor antibody to alter, preferably improve, antigen binding. These framework substitutions are identified by methods well known in the art, e.g., by modeling of the interactions of the CDR and framework residues to identify framework residues important for antigen binding, and by sequence comparison to identify unusual framework residues at particular positions. (U.S. Pat. Nos. 5,693,762 and 5,585,089; Riechmann, L. et al., Reshaping human antibodies for therapy. Nature. 1988 Mar. 24; 332(6162):323-7, which are incorporated herein by reference in their entireties). Antibodies can be humanized using a variety of techniques known in the art, including, for example, CDR-grafting (EP 239,400; PCT publication WO 91/09967; U.S. Pat. Nos. 5,225,539; 5,530,101; and 5,585,089); veneering or resurfacing (EP 592,106; EP 519,596; Padlan, E. A., A possible procedure for reducing the immunogenicity of antibody variable domains while preserving their ligand-binding properties. Mol Immunol. 1991 April-May; 28(4-5):489-98; Studnicka, G. M. et al., Human-engineered monoclonal antibodies retain full specific binding activity by preserving non-CDR complementarity-modulating residues. Protein Eng. 1994 June; 7(6):805-14; Roguska, M. A. et al., Humanization of murine monoclonal antibodies through variable domain resurfacing. Proc Natl Acad Sci USA. 1994 Feb. 1; 91(3):969-73); and chain shuffling (U.S. Pat. No. 5,565,332); each of which is incorporated herein by reference in their entirety.

[0164] Completely human antibodies are particularly desirable for therapeutic treatment of human patients, so as to avoid or alleviate immune reaction to foreign protein. Human antibodies can be made by a variety of methods known in the art, including the antibody display methods described above, using antibody libraries derived from human immunoglobulin sequences. See also, U.S. Pat. Nos. 4,444,887 and 4,716,111; and PCT publications WO 98/46645, WO 98/50433, WO 98/24893, WO 98/16654, WO 96/34096, WO 96/33735, and WO 91/10741; each of which is incorporated herein by reference in its entirety.

[0165] Human antibodies can also be produced using transgenic mice which are incapable of expressing functional endogenous immunoglobulins, but which can express human immunoglobulin polynucleotides. For example, the human heavy and light chain immunoglobulin polynucleotide complexes can be introduced randomly, or by homologous recombination, into mouse embryonic stem cells. Alternatively, the human variable region, constant region, and diversity region may be introduced into mouse embryonic stem cells, in addition to the human heavy and light chain polynucleotides. The mouse heavy and light chain immunoglobulin polynucleotides can be rendered nonfunctional separately or simultaneously with the introduction of human immunoglobulin loci by homologous recombination. In particular, homozygous deletion of the J_{H} region prevents endogenous antibody production. The modified embryonic stem cells are expanded and microinjected into blastocysts to produce chimeric mice. The chimeric mice are then bred to produce homozygous offspring which express human antibodies. The transgenic mice are immunized in the normal fashion with a selected antigen, e.g., all or a portion of a polypeptide of the invention.

[0166] Thus, using such a technique, it is possible to produce useful human IgG, IgA, IgM, IgD and IgE antibodies. For an overview of the technology for producing human antibodies, see Lonberg and Huszar (Lonberg, N. et al., Human antibodies from transgenic mice. Int Rev Immunol. 1995; 13(1):65-93). For a detailed discussion of the technology for producing human antibodies and human monoclonal antibodies and protocols for producing such antibodies, see, e.g., PCT publications WO 98/24893; WO 92/01047; WO 96/34096; WO 96/33735; U.S. Pat. Nos. 5,413,923; 5,625,126; 5,633,425; 5,569,825; 5,661,016; 5,545,806; 5,814,318; 5,885,793; 5,916,771; 5,939,598; 6,075,181; and 6,114,598, each of which are incorporated by reference herein in their entirety. In addition, companies such as Abgenix, Inc. (Fremont, Calif.), Protein Design Labs, Inc. (Mountain View, Calif.) and Genpharm (San Jose, Calif.) can be engaged to provide human antibodies directed against a selected antigen using technology similar to the above described technologies.

[0167] Once an antibody molecule of the present invention has been produced by an animal, a cell line, chemically synthesized, or recombinantly expressed, it can be purified (i.e., isolated) by any method known in the art for the purification of an immunoglobulin or polypeptide molecule, for example, by chromatography (e.g., ion exchange, affinity, particularly by affinity for the specific antigen, Protein A, and sizing column chromatography), centrifugation, differential solubility, or by any other standard technique for the purification of proteins. In addition, the antibodies of the present invention or fragments thereof can be fused to heterologous polypeptide sequences described herein or otherwise known in the art, to facilitate purification.

### Nucleic Acids

[0168] The present invention embraces nucleic acid molecules. In some embodiments, nucleic acids encode GDAs. Such nucleic acid molecules include, without limitation, DNA molecules, RNA molecules, polynucleotides, oligonucleotides, mRNA molecules, vectors, plasmids and the like. In some embodiments, nucleic acids are themselves GDAs. Such GDAs may comprise nucleic acid aptamers. Also included are cells programmed or generated to express the nucleic acid molecules disclosed above.

### II. TARGETS OF THE INVENTION

[0169] Broadly, any biomolecule, cellular structure, cellular signaling pathway or cell niche capable of being bound, sequestered, contacted or altered by a GDA composition of the invention is considered a “target” of the invention. Targets of the present invention, when referring to the binding or interaction with GDAs such as antibodies include ECCM signaling molecules, specifically those of the TGF-beta and integrin families.

### The TGF-Beta Family

[0170] The TGF-beta family is of wide importance. In embryogenesis, its 33 members regulate all major developmental processes and the details of the formation of almost all organs. Although much of the key work regulated by this family is accomplished by the time of birth, afterwards the family continues to regulate many processes including immune responses, wound healing, bone growth, endocrine functions, and muscle mass.

[0171] In some cytokine families, restricted expression of the ligands or the receptors is key to regulating signaling. However, many TGF-beta superfamily ligands and receptors are expressed widely, and release of the ligand from a latent form stored extracellularly is the key activating step. The importance of the ligands is emphasized by their expansion in the evolution of TGF-beta signaling pathway components. TGF-beta, alone, has been implicated in fibrosis, and is a major target in kidney fibrosis, pulmonary fibrosis and myelofibrosis, each of which is recognized as a major medical unmet need.

[0172] The 33 members of the TGF-beta superfamily, as well as the four ligands related to glial cell derived neurotrophic factor (GDNF) are listed in Table 3.

TABLE 3
TGF-beta Superfamily Targets

| | | | SEQ |
|---|---|---|---|
| | | Accession | ID |
| Name | Symbol | Number | NO |
| Transforming growth factor beta 1 | TGFB1 | NP_000651.3 | 74 |
| Transforming growth factor beta 2, | TGFB2 | NP_001129071.1 | 75 |
| isoform 1 | | | |
| Transforming growth factor beta 2, | TGFB2 | NP_003229.1 | 76 |
| isoform 2 | | | |
| Transforming growth factor beta 3 | TGFB3 | NP_003230.1 | 77 |
| Growth/differentiation factor 11 | GDF11 | NP_005802.1 | 78 |
| Growth/differentiation factor 8 | GDF8 | NP_005250.1 | 79 |
| Inhibin beta A chain | INHBA | NP_002183.1 | 80 |
| Inhibin beta B chain | INHBB | NP_002184.2 | 81 |
| Inhibin beta C chain | INHBC | NP_005529.1 | 82 |
| Inhibin beta E chain | INHBE | NP_113667.1 | 83 |
| Left-right determination factor 1 | LEFTY1 | NP_066277.1 | 84 |
| Left-right determination factor 2 | LEFTY2 | NP_003231.2 | 85 |
| Growth/differentiation factor 15 | GDF15 | NP_004855.2 | 86 |
| Anti-Mullerian hormone | AMH | NP_000470.2 | 87 |
| Inhibin alpha | INHA | NP_002182.1 | 88 |
| Growth/differentiation factor 1 | GDF1 | NP_001483.3 | 89 |
| Growth/differentiation factor 3 | GDF3 | NP_065685.1 | 90 |
| Growth/differentiation factor 5 | GDF5 | NP_000548.1 | 91 |
| Growth/differentiation factor 6 | GDF6 | NP_001001557.1 | 92 |
| Growth/differentiation factor 7 | GDF7 | NP_878248.2 | 93 |
| Bone morphogenetic protein 10 | BMP10 | NP_055297.1 | 94 |
| Growth/differentiation factor 2 | GDF2 | NP_057288.1 | 95 |
| Nodal homolog (mouse) | NODAL | NP_060525.3 | 96 |
| Bone morphogenetic protein 2 | BMP2 | NP_001191.1 | 97 |
| Bone morphogenetic protein 4 | BMP4 | NP_001193.2 | 98 |
| Bone morphogenetic protein 5 | BMP5 | NP_066551.1 | 99 |
| Bone morphogenetic protein 6 | BMP6 | NP_001709.1 | 100 |
| Bone morphogenetic protein 7 | BMP7 | NP_001710.1 | 101 |
| Bone morphogenetic protein 8A | BMP8A | NP_861525.2 | 102 |
| Bone morphogenetic protein 8B | BMP8B | NP_001711.2 | 103 |
| Bone morphogenetic protein 15 | BMP15 | NP_005439.2 | 104 |
| Growth/differentiation factor 9 | GDF9 | NP_005251.1 | 105 |
| Bone morphogenetic protein 3 | BMP3 | NP_001192.2 | 106 |
| Growth/differentiation factor 10 | GDF10 | NP_004953.1 | 107 |
| Glial cell line-derived neurotrophic | GDNF | NP_000505.1 | 108 |
| factor | | | |
| Neurturin | NRTN | NP_004549.1 | 109 |
| Persephin | PSPN | NP_004149.1 | 110 |
| Artemin | ARTN | NP_476432.2 | 111 |

[0173] In one embodiment, GDA antibodies are designed to modulate myostatin activity. Myostatin is involved in regulating the degradation of damaged muscle fibrils, and its deficiency increases muscle mass (Rodino-Klapac, L. R. et al., Inhibition of myostatin with emphasis on follistatin as a therapy for muscle disease. Muscle Nerve. 2009 March; 39(3):283-96). In some embodiments, GDA antibodies serve to trigger degradation of the myostatin-prodomain complex and/or prevent activation of myostatin. In a further embodiment, GDA antibodies block the protease cleavage site recognized by members of the BMP1/tolloid protease family. Such antibodies to latent TGF-beta or latent myostatin might also be used to trigger degradation of latent TGF-beta-LTBP complexes, or latent myostatin complexes with proteoglycans after secretion by cells and prior to their deposition in the extracellular matrix. Such GDAs that inhibit myostatin activity may be used to repair and/or enhance muscle tissues.

### Integrins

[0174] Integrins are cell surface heterodimers formed by alpha and beta subunits, each of which has a transmembrane domain and in the N-terminal portion of the extracellular domain come together to form the ligand binding site. Thus, both the αᵥ and β₆ subunits form the ligand binding site of αᵥβ₆ integrin.

[0175] Like integrins αIIbβ3, α₅β₁, and α₈β₁, αᵥ integrins recognize the Arg-Gly-Asp or RGD sequence as a key component of the ligand. However, αᵥβ₆ and αᵥβ₈ recognize more than just the RGD in TGF-beta, and are also quite unusual in binding with high affinity to TGF-beta1 and 3 without any need for activation. Essentially all other integrins require activation signals, provided by association with the actin cytoskeleton, for “inside-out” signals that induce a conformational change in the integrin ectodomain and increase affinity for ligand by about 1,000 to 10,000-fold. Knockouts of the β₆ and β₈ subunits have shown they are very important in pulmonary fibrosis and tolerance induction by dendritic cells, respectively.

[0176] Furthermore, the key role of the RGD motif and hence activation by αᵥβ₆ and αᵥβ₈ is shown by the similarity in the phenotypes of RGD/RGE TGF-beta1 knock-in and β₆/β₈ and TGF-beta1 knockouts. The β₆ and β₈ (and β₅) subunits only associate with αᵥ.

[0177] A subset of half of integrin-α subunits contain an inserted, or αI, domain, which is the ligand-binding domain when present. Such integrins include the β₂ integrins selectively expressed on leukocytes such as α_{L}β₂, and the collagen-binding integrins α₁β₁, α₂β₁, α₁₀β₁, and α₁₁β₁. As its name very late activation antigen-1 (VLA-1) implies, α₁β₁ is expressed on lymphocytes only late (over a time course of days) after activation by specific antigen. Among all four collagen binding integrins, antibodies to α₁ have by far the most profound ability to inhibit in vivo models of disease in animals.

[0178] The crystal structures of many integrins have been determined. These include complexes of the integrin α₄β₇ bound to small molecule antagonists and the therapeutic antibodies Natalizumab and Vedolizumab (Yu, Y. et al. Structural specializations of α(4)β(7), an integrin that mediates rolling adhesion. J Cell Biol. 2012 Jan. 9; 196(1):131-46).

[0179] None of the antibodies in the art, however, bind to the ligand binding site which is defined by the small molecule antagonist in a cleft at the interface between the α₄ and β₇ subunits. Instead, the antibodies bind to epitopes that contain human/rodent amino acid substitutions, with the epitopes sufficiently close to the ligand binding site for the Fab fragment of the antibody to sterically interfere with one of the domains of the ligand, This domain is often not domain 1 that binds to the integrin but domain 2 which is nearby. Similarly, an antibody to the I domain of LFA 1 that was in the clinic for several years for the treatment of psoriasis, did not block binding directly. Instead, it sterically prevented domain 2 of ICAM-1 from coming close enough to LFA-1 to enable domain 1 of ICAM-1 to bind. The history of antibody therapeutic development to integrins is thus limited to particular human/rodent amino acid substitutions that enabled antibodies to be elicited, and secondarily to the functional selection of antibodies that also had the properties of blocking ligand binding.

[0180] In one embodiment, antibodies are contemplated which function specifically to bind or interact with the ligand binding site or other specific locations on the GPC.

[0181] Integrins are less conserved than TGF-beta family members. Among the collagen-binding integrin α-subunits, α₁ is 38, 34, and 37% identical to α₂, α₁₀, and α₁₁, respectively. However, conservation in the ligand-binding αI domain is higher, at 54-56%. Between human and mouse, the complete α₁ ectodomain and ligand-binding αI domain are 88% and 94% identical, respectively. The αᵥ subunit is 36 to 46% identical to other RGD-binding integrin α-subunits, and 19-25% identical to the α-subunits of other integrin subfamilies. Between human and mouse, the αᵥ and β₆ ectodomains are 93 and 90% identical, respectively.

[0182] Recently VLA-1 has also been identified as a receptor for semaphorin 7A. A subset of semaphorins, which mediate axon guidance and synapse formation in the nervous system, function in the immune system, and are also targets of the invention as blocking antibodies.

[0183] Integrins α₄β₁, α₄β₇, and αLβ₂ (LFA-1) are already proven targets for lymphocyte-mediated autoimmune disease including multiple sclerosis, Crohn's disease, and psoriasis. Integrins α₁β₁ (VLA-1) and the αᵥ integrins, αᵥβ₆ and αᵥβ₈, are promising targets for fibrosis and antibodies directed to each of these is contemplated by the present invention.

[0184] The integrin subunit targets of the present invention are listed in Table 4.

TABLE 4
Integrin Subunit Targets

| | | Accession | SEQ |
|---|---|---|---|
| Name | Gene Symbol | Number | ID NO |
| α₁ | ITGA1 | NP_852478.1 | 112 |
| α₂ | ITGA2 | NP_002194.2 | 113 |
| αIIb | ITGA2B | NP_000410.2 | 114 |
| α₃ | ITGA3 | NP_005492.1 | 115 |
| α₄ | ITGA4 | NP_000876.3 | 116 |
| α₅ | ITGA5 | NP_002196.2 | 117 |
| α₆ | ITGA6 | NP_001073286.1 | 118 |
| α₇ | ITGA7 | NP_001138468.1 | 119 |
| α₈ | ITGA8 | NP_003629.1 | 120 |
| α₉ | ITGA9 | NP_002198.2 | 121 |
| α₁₀ | ITGA10 | NP_003628.2 | 122 |
| α₁₁ | ITGA11 | NP_001004439.1 | 123 |
| α_{D} | ITGAD | NP_005344.2 | 124 |
| α_{E} | ITGAE | NP_002199.3 | 125 |
| α_{L} | ITGAL | NP_002200.2 | 126 |
| α_{M} | ITGAM | NP_001139280.1 | 127 |
| α_{V} | ITGAV | NP_002201.1 | 128 |
| α_{X} | ITGAX | NP_000878.2 | 129 |
| β₁ | ITGB1 | NP_391988.1 | 130 |
| β₂ | ITGB2 | NP_000202.2 | 131 |
| β₃ | ITGB3 | NP_000203.2 | 132 |
| β₄ | ITGB4 | NP_000204.3 | 133 |
| β₅ | ITGB5 | NP_002204.2 | 134 |
| β₆ | ITGB6 | NP_000879.2 | 135 |
| β₇ | ITGB7 | NP_000880.1 | 136 |
| β₈ | ITGB8 | NP_002205.1 | 137 |

### Type I, Type II and Type III Receptors

[0185] Type I, II and III receptors are also contemplated as targets of the present invention. Outside of the cell, TGF-beta can bind to either the type III TGF-beta receptor (RIM or the type II TGF-beta receptor (RII). RIII merely functions in the presentation of TGF-beta to the RII receptor. RIII proteins are the most abundant and are important factors in determining overall TGF-beta signaling activity. They bind TGF-beta with high affinity and there are different types expressed in different cell types. TGF-beta receptor 3 (TGFBR3), also known as betaglycan, is ubiquitously expressed, while another RIII, endoglin, is primarily expressed in vascular endothelial cells. Both are type I transmembrane proteins with small intracellular domains and large extracellular domains. They are also both susceptible to cleavage of their extracellular domains, which become soluble antagonists, binding and neutralizing TGF-beta before it can interact with the cell.

[0186] Binding of TGF-beta to an RII leads to the recruitment of the type I TGF-beta receptor (RI). There are seven RI proteins also known as activin-like receptor kinases (ALKs) as well multiple RII proteins (listed in Table 5). Together, TGF-beta, RI and RII combine to form a growth factor-receptor complex (GRC). GRC formation stimulates the phosphorylation of RI on tyrosine and serine/threonine residues by an RI protein kinase. Once phosphorylated, RI itself exhibits kinase activity, leading to the phosphorylation and activation of Smad transcription factors.

[0187] Three groups of Smads exist including R-Smads (receptor-associated Smads), Co-Smads (co-operating Smads) and I-Smads (inhibitory Smads). R-Smads are transcription factors that remain inactive in the cytoplasm prior to activation by RI phosphorylation. Among the R-Smads are Smad1, Smad2, Smad3, Smad5 and Smad8. Phosphorylated R-Smads bind to the Co-Smad, Smad4, before traveling together to the nucleus to collaborate with other transcription factors in the expression of TGF-beta-responsive genes. Among the genes expressed are those of the I-Smads, Smad 6 and Smad7. Their expression is part of a negative-feedback loop to suppress continued TGF-beta signaling (Santibanez, J. F. et al., TGF-beta/TGF-beta receptor system and its role in physiological and pathological conditions. Clin Sci (Loud). 2011 September; 121(6):233-51; Blobe, G. C. et al., Role of transforming growth factor beta in human disease. N Engl J Med. 2000 May 4; 342(18):1350-8).

TABLE 5
Type I, II and III Receptor Targets

| | | Accession | SEQ |
|---|---|---|---|
| Name | Symbol | Number | ID NO |
| Type I Receptors | | | |
| Activin receptor-like kinase 1 | ALK1 | NP_001070869.1 | 138 |
| Activin receptor-like kinase 2 | ALK2 | NP_001104537.1 | 139 |
| Activin receptor-like kinase 3 | ALK3 | NP_004320.2 | 140 |
| Activin receptor-like kinase 4 | ALK4 | NP_064733.3 | 141 |
| Activin receptor-like kinase 5 | ALK5 | NP_004603.1 | 142 |
| Activin receptor-like kinase 6 | ALK6 | NP_001243722.1 | 143 |
| Activin receptor-like kinase 7 | ALK7 | NP_660302.2 | 144 |
| Type II Receptors | | | |
| TGF-beta receptor 2 | TGFBR2 | NP_001020018.1 | 145 |
| BMP receptor 2 | BMPR2 | NP_001195.2 | 146 |
| Type III Receptors | | | |
| TGF-beta receptor 3 | TGFBR3 | NP_003234.2 | 147 |
| Endoglin | ENG | NP_001108225.1 | 148 |

[0188] According to the present invention, antibodies may be designed which selectively block only the RI, RII or RIII receptor binding sites, and as such these antibodies would act as antagonists and function superior to antibodies that block binding to both sites. Antibodies specific for a single receptor binding site are also contemplated which may be used analogously to receptor-Fc fusion proteins as antagonists, which are currently in clinical trials and show efficacy. Additionally, antibodies that bind to sites of interaction between the receptor types to enhance or disrupt GRC formation are contemplated.

### Notch and Wnt Pathway Members

[0189] The proteins of the notch and wnt signaling pathways are over 90% identical between mouse and human. Notch 1 is mutated in 50% of acute lymphocytic leukemia and the mutations are activating. Canonical Notch signaling involves the binding of a ligand protein to a Notch transmembrane receptor. Binding initiates proteolytic cleavage, releasing the intracellular domain where it can travel to the nucleus and participate in Notch-dependent gene regulation (Andersson, E. R. et al., Notch signaling: simplicity in design, versatility in function. Development. 2011 September; 138(17):3593-612). In some embodiments, Notch transmembrane receptors comprise regulatory elements that modulate proteolytic cleavage of the receptor. Some progress has been made in the development of Notch antibodies. “Wnt” proteins, as referred to herein, are a class of cell signaling proteins known to direct cell polarity, plasticity, growth and proliferation. In some embodiments, Wnt proteins may be growth factors. They are named through a combination of the genes Wingless, identified in flies, and the Int-1 gene, identified by its upregulation in virally induced breast tumors. Canonical Wnt signaling involves the binding of a Wnt protein to a corresponding Frizzled (Fz) receptor and the coreceptor, low density lipoprotein receptor-like protein (LRP) 5 or 6. The intracellular effect is the rescue of beta-catenin from degradation, allowing it to travel to the nucleus and participate in genetic regulation. Wnt signaling has been shown to be disrupted in some diseases. Examples of such diseases include, but are not limited to cancer, diabetes and coronary artery disease (Clevers, H. et al., Wnt/β-catenin signaling and disease. Cell. 2012 Jun. 8; 149(6):1192-205). In some embodiments, Wnt proteins comprise regulatory elements. Such elements may be required for associations of Wnt with other factors. In one embodiment, Wnt regulatory elements modulate the interaction of Wnt with ECCM components including, but not limited to sugar moieties and/or proteoglycans. In some embodiments, GDAs may target regulatory elements on Notch and/or Wnt resulting in stimulation, enhancement, inhibition and/or blockage of Notch and/or Wnt activity. In some embodiments, GDAs may act to modulate Notch or Wnt activity by targeting proteins involved in Wnt and Notch-dependent cell signaling. Such targets are listed in Table 6.

TABLE 6
Notch and Wnt Targets

| | | Accession | SEQ ID |
|---|---|---|---|
| Name | Symbol | Number | NO |
| ADAM metallopeptidase domain 10 | ADAM10 | NP_001101.1 | 149 |
| ADAM metallopeptidase domain 17 | ADAM17 | NP_003174.3 | 150 |
| Adenomatous polyposis coli | APC | NP_001120982.1 | 151 |
| Amino-terminal enhancer of split | AES | NP_945320.1 | 152 |
| Axin 1 | AXIN1 | NP_003493.1 | 153 |
| Axin 2 | AXIN2 | NP_004646.3 | 154 |
| B-cell CLL/lymphoma 9 | BCL9 | NP_004317.2 | 155 |
| Beta-transducin repeat containing | BTRC | NP_378663.1 | 156 |
| Cas-Br-M (murine) ecotropic retroviral | CBL | NP_005179.2 | 157 |
| transforming sequence | | | |
| Casein kinase 1, alpha 1 | CSNK1A1 | NP_001020276.1 | 158 |
| Casein kinase 2, alpha 1 polypeptide | CSNK2A1 | NP_808227.1 | 159 |
| CASP8 and FADD-like apoptosis regulator | CFLAR | NP_001120655.1 | 160 |
| Catenin (cadherin-associated protein), beta | CTNNB1 | NP_001091679.1 | 161 |
| 1, 88 kDa | | | |
| Catenin, beta interacting protein 1 | CTNNBIP1 | NP_001012329.1 | 162 |
| CD44 molecule (Indian blood group) | CD44 | NP_000601.3 | 163 |
| C-fos induced growth factor (vascular | FIGF | NP_004460.1 | 164 |
| endothelial growth factor D) | | | |
| Conserved helix-loop-helix ubiquitous | CHUK | NP_001269.3 | 165 |
| kinase | | | |
| C-terminal binding protein 1 | CTBP1 | NP_001319.1 | 166 |
| CXXC finger protein 4 | CXXC4 | NP_079488.2 | 167 |
| Cyclin D1 | CCND1 | NP_444284.1 | 168 |
| Cyclin D2 | CCND2 | NP_001750.1 | 169 |
| Cyclin E1 | CCNE1 | NP_001229.1 | 170 |
| Cyclin-dependent kinase inhibitor 1A (p21, | CDKN1A | NP_001207707.1 | 171 |
| Cip1) | | | |
| Delta-like 1 (Drosophila) | DLL1 | NP_005609.3 | 172 |
| Delta-like 3 (Drosophila) | DLL3 | NP_058637.1 | 173 |
| Delta-like 4 (Drosophila) | DLL4 | NP_061947.1 | 174 |
| Deltex homolog 1 (Drosophila) | DTX1 | NP_004407.2 | 175 |
| Dickkopf homolog 1 (Xenopus laevis) | DKK1 | NP_036374.1 | 176 |
| Dickkopf homolog 3 (Xenopus laevis) | DKK3 | NP_001018067.1 | 177 |
| Disabled homolog 2, mitogen-responsive | DAB2 | NP_001334.2 | 178 |
| phosphoprotein (Drosophila) | | | |
| Dishevelled associated activator of | DAAM1 | NP_055807.1 | 179 |
| morphogenesis 1 | | | |
| Dishevelled, dsh homolog 1 (Drosophila) | DVL1 | NP_004412.2 | 180 |
| Dishevelled, dsh homolog 2 (Drosophila) | DVL2 | NP_004413.1 | 181 |
| DIX domain containing 1 | DIXDC1 | NP_001033043.1 | 182 |
| E1A binding protein p300 | EP300 | NP_001420.2 | 183 |
| FBJ murine osteosarcoma viral oncogene | FOS | NP_005243.1 | 184 |
| homolog | | | |
| F-box and WD repeat domain containing | FBXW11 | NP_036432.2 | 185 |
| 11 | | | |
| F-box and WD repeat domain containing 4 | FBXW4 | NP_071322.1 | 186 |
| Fibroblast growth factor 4 | FGF4 | NP_001998.1 | 187 |
| Forkhead box N1 | FOXN1 | NP_003584.2 | 188 |
| FOS-like antigen 1 | FOSL1 | NP_005429.1 | 189 |
| Frequently rearranged in advanced T-cell | FRAT1 | NP_005470.2 | 190 |
| lymphomas | | | |
| Frizzled family receptor 1 | FZD1 | NP_003496.1 | 191 |
| Frizzled family receptor 2 | FZD2 | NP_001457.1 | 192 |
| Frizzled family receptor 3 | FZD3 | NP_059108.1 | 193 |
| Frizzled family receptor 4 | FZD4 | NP_036325.2 | 194 |
| Frizzled family receptor 5 | FZD5 | NP_003459.2 | 195 |
| Frizzled family receptor 6 | FZD6 | NP_003497.2 | 196 |
| Frizzled family receptor 7 | FZD7 | NP_003498.1 | 197 |
| Frizzled family receptor 8 | FZD8 | NP_114072.1 | 198 |
| Frizzled family receptor 9 | FZD9 | NP_003499.1 | 199 |
| Frizzled-related protein | FRZB | NP_001454.2 | 200 |
| GLI family zinc finger 1 | GLI1 | NP_005260.1 | 201 |
| Glycogen synthase kinase 3 alpha | GSK3A | NP_063937.2 | 202 |
| Glycogen synthase kinase 3 beta | GSK3B | NP_002084.2 | 203 |
| Hairless homolog (mouse) | HR | NP_005135.2 | 204 |
| Hairy and enhancer of split 1, (Drosophila) | HES1 | NP_005515.1 | 205 |
| Hairy and enhancer of split 5 (Drosophila) | HES5 | NP_001010926.1 | 206 |
| Hairy/enhancer-of-split related with | HEY1 | NP_001035798.1 | 207 |
| YRPW (SEQ ID NO: 319) motif 1 | | | |
| Hairy/enhancer-of-split related with | HEY2 | NP_036391.1 | 208 |
| YRPW (SEQ ID NO: 319) motif 2 | | | |
| Hairy/enhancer-of-split related with | HEYL | NP_055386.1 | 209 |
| YRPW (SEQ ID NO: 319) motif-like | | | |
| Histone deacetylase 1 | HDAC1 | NP_004955.2 | 210 |
| Homeobox B4 | HOXB4 | NP_076920.1 | 211 |
| Inhibitor of DNA binding 1, dominant | ID1 | NP_002156.2 | 212 |
| negative helix-loop-helix protein | | | |
| Interferon, gamma | IFNG | NP_000610.2 | 213 |
| Interleukin 17B | IL17B | NP_055258.1 | 214 |
| Interleukin 2 receptor, alpha | IL2RA | NP_000408.1 | 215 |
| Jagged 1 | JAG1 | NP_000205.1 | 216 |
| Jagged 2 | JAG2 | NP_002217.3 | 217 |
| Jun proto-oncogene | JUN | NP_002219.1 | 218 |
| Keratin 1 | KRT1 | NP_006112.3 | 219 |
| Kringle containing transmembrane protein 1 | KREMEN1 | NP_114434.3 | 220 |
| LFNG O-fucosylpeptide 3-beta-N- | LFNG | NP_001035257.1 | 221 |
| acetylglucosaminyltransferase | | | |
| LIM domain only 2 (rhombotin-like 1) | LMO2 | NP_005565.2 | 222 |
| Loricrin | LOR | NP_000418.2 | 223 |
| Low density lipoprotein receptor-related | LRP5 | NP_002326.2 | 224 |
| protein 5 | | | |
| Low density lipoprotein receptor-related | LRP6 | NP_002327.2 | 225 |
| protein 6 | | | |
| Lymphoid enhancer-binding factor 1 | LEF1 | NP_057353.1 | 226 |
| Mastermind-like 1 (Drosophila) | MAML1 | NP_055572.1 | 227 |
| Mastermind-like 2 (Drosophila) | MAML2 | NP_115803.1 | 228 |
| Matrix metallopeptidase 7 (matrilysin, | MMP7 | NP_002414.1 | 229 |
| uterine) | | | |
| MFNG O-fucosylpeptide 3-beta-N- | MFNG | NP_002396.2 | 230 |
| acetylglucosaminyltransferase | | | |
| Mitogen-activated protein kinase 8 | MAPK8 | NP_620637.1 | 231 |
| Naked cuticle homolog 1 (Drosophila) | NKD1 | NP_149110.1 | 232 |
| Nemo-like kinase | NLK | NP_057315.3 | 233 |
| Neuralized homolog (Drosophila) | NEURL | NP_004201.3 | 234 |
| Nicastrin | NCSTN | NP_056146.1 | 235 |
| Notch 1 | NOTCH1 | NP_060087.3 | 236 |
| Notch 2 | NOTCH2 | NP_077719.2 | 237 |
| Notch 2 N-terminal like | NOTCH2NL | NP_982283.2 | 238 |
| Notch 3 | NOTCH3 | NP_000426.2 | 239 |
| Notch 4 | NOTCH4 | NP_004548.3 | 240 |
| Nuclear factor of activated T-cells, | NFATC1 | NP_765975.1 | 241 |
| cytoplasmic, calcineurin-dependent 1 | | | |
| Nuclear factor of kappa light polypeptide | NFKB1 | NP_003989.2 | 242 |
| gene enhancer in B-cells 1 | | | |
| Nuclear factor of kappa light polypeptide | NFKB2 | NP_001070962.1 | 243 |
| gene enhancer in B-cells 2 (p49/p100) | | | |
| Nuclear receptor corepressor 2 | NCOR2 | NP_006303.4 | 244 |
| Nuclear receptor subfamily 4, group A, | NR4A2 | NP_006177.1 | 245 |
| member 2 | | | |
| Numb homolog (Drosophila) | NUMB | NP_001005743.1 | 246 |
| Paired box 5 | PAX5 | NP_057953.1 | 247 |
| Paired-like homeodomain 2 | PITX2 | NP_001191326.1 | 248 |
| Peroxisome proliferator-activated receptor | PPARD | NP_001165289.1 | 249 |
| delta | | | |
| Peroxisome proliferator-activated receptor | PPARG | NP_056953.2 | 250 |
| gamma | | | |
| Porcupine homolog (Drosophila) | PORCN | NP_982301.1 | 251 |
| Pre T-cell antigen receptor alpha | PTCRA | NP_001230097.1 | 252 |
| Presenilin 1 | PSEN1 | NP_000012.1 | 253 |
| Presenilin 2 (Alzheimer disease 4) | PSEN2 | NP_000438.2 | 254 |
| Presenilin enhancer 2 homolog (C. elegans) | PSENEN | NP_758844.1 | 255 |
| Prickle homolog 1 (Drosophila) | PRICKLE1 | NP_001138355.1 | 256 |
| Protein O-fucosyltransferase 1 | POFUT1 | NP_056167.1 | 257 |
| Pygopus homolog 1 (Drosophila) | PYGO1 | NP_056432.1 | 258 |
| Ras homolog gene family, member A | RHOA | NP_001655.1 | 259 |
| Ras homolog gene family, member U | RHOU | NP_067028.1 | 260 |
| Recombination signal binding protein for | RBPJL | NP_055091.2 | 261 |
| immunoglobulin kappa J region-like | | | |
| RFNG O-fucosylpeptide 3-beta-N- | RFNG | NP_002908.1 | 262 |
| acetylglucosaminyltransferase | | | |
| Runt-related transcription factor 1 | RUNX1 | NP_001745.2 | 263 |
| RuvB-like 1 (E. coli) | RUVBL1 | NP_003698.1 | 264 |
| SCL/TAL1 interrupting locus | STIL | NP_001041631.1 | 265 |
| Secreted frizzled-related protein 1 | SFRP1 | NP_003003.3 | 266 |
| Secreted frizzled-related protein 4 | SFRP4 | NP_003005.2 | 267 |
| Sel-1 suppressor of lin-12-like (C. elegans) | SEL1L | NP_005056.3 | 268 |
| SH2 domain containing 1A | SH2D1A | NP_002342.1 | 269 |
| Signal transducer and activator of | STAT6 | NP_003144.3 | 270 |
| transcription 6, interleukin-4 induced | | | |
| Smoothened, frizzled family receptor | SMO | NP_005622.1 | 271 |
| SNW domain containing 1 | SNW1 | NP_036377.1 | 272 |
| Sonic hedgehog | SHH | NP_000184.1 | 273 |
| SRY (sex determining region Y)-box 17 | SOX17 | NP_071899.1 | 274 |
| Suppressor of fused homolog (Drosophila) | SUFU | NP_057253.2 | 275 |
| Transcription factor 7 (T-cell specific, | TCF7 | NP_003193.2 | 276 |
| HMG-box) | | | |
| Transcription factor 7-like 1 (T-cell | TCF7L1 | NP_112573.1 | 277 |
| specific, HMG-box) | | | |
| Transducin-like enhancer of split 1 (E(sp1) | TLE1 | NP_005068.2 | 278 |
| homolog, Drosophila) | | | |
| Vang-like 2 (van gogh, Drosophila) | VANGL2 | NP_065068.1 | 279 |
| V-erb-b2 erythroblastic leukemia viral | ERBB2 | NP_004439.2 | 280 |
| oncogene homolog 2, neuro/glioblastoma | | | |
| derived oncogene homolog (avian) | | | |
| V-myc myelocytomatosis viral oncogene | MYC | NP_002458.2 | 281 |
| homolog (avian) | | | |
| Wingless-type MMTV integration site | WNT2 | NP_003382.1 | 282 |
| family member 2 | | | |
| Wingless-type MMTV integration site | WNT1 | NP_005421.1 | 283 |
| family, member 1 | | | |
| Wingless-type MMTV integration site | WNT10A | NP_079492.2 | 284 |
| family, member 10A | | | |
| Wingless-type MMTV integration site | WNT11 | NP_004617.2 | 285 |
| family, member 11 | | | |
| Wingless-type MMTV integration site | WNT16 | NP_476509.1 | 286 |
| family, member 16 | | | |
| Wingless-type MMTV integration site | WNT2B | NP_078613.1 | 287 |
| family, member 2B | | | |
| Wingless-type MMTV integration site | WNT3 | NP_110380.1 | 288 |
| family, member 3 | | | |
| Wingless-type MMTV integration site | WNT3A | NP_149122.1 | 289 |
| family, member 3A | | | |
| Wingless-type MMTV integration site | WNT4 | NP_110388.2 | 290 |
| family, member 4 | | | |
| Wingless-type MMTV integration site | WNT5A | NP_003383.2 | 291 |
| family, member 5A | | | |
| Wingless-type MMTV integration site | WNT5B | NP_110402.2 | 292 |
| family, member 5B | | | |
| Wingless-type MMTV integration site | WNT6 | NP_006513.1 | 293 |
| family, member 6 | | | |
| Wingless-type MMTV integration site | WNT7A | NP_004616.2 | 294 |
| family, member 7A | | | |
| Wingless-type MMTV integration site | WNT7B | NP_478679.1 | 295 |
| family, member 7B | | | |
| Wingless-type MMTV integration site | WNT8A | NP_490645.1 | 296 |
| family, member 8A | | | |
| Wingless-type MMTV integration site | WNT9A | NP_003386.1 | 297 |
| family, member 9A | | | |
| WNT inhibitory factor 1 | WIF1 | NP_009122.2 | 298 |
| WNT1 inducible signaling pathway protein 1 | WISP1 | NP_003873.1 | 299 |
| Zic family member 2 | ZIC2 | NP_009060.2 | 300 |

### Natural Antagonists

[0190] A number of natural antagonists function to regulate development in vivo, such as the bone morphogenic protein (BMP) antagonists chordin, noggin, gremlin, sclerostin, and twisted gastrulation. The cysteine knot motif is present in many of these antagonists, and they mostly prevent the ligand from interacting with the receptor. Some antagonists prevent the processing of the mature ligand. And while one monoclonal antibody against sclerostin, also a powerful Wnt pathway inhibitor, is under clinical investigation as a new approach to increase bone mass in osteoporosis, there remains a need for antibodies directed to other natural antagonists.

[0191] For example, Dickkopf1 (DKK1) and secreted Frizzled-related protein (SFRP1) are two such inhibitors that negatively regulate bone mass and could be antagonized in osteoporosis. Another natural antagonists which may be targeted is follistatin. Follistatin is an activin-binding protein, interacting with high affinity and blocking activin-dependent signal transduction. The follistatin gene is also upregulated by activin signaling, providing negative feedback inhibition to the pathway. Follistatin expression is relatively ubiquitous throughout the body and the activin-follistatin system is implicated in multiple disorders in a variety of tissues making follistatin an attractive target for potential therapeutics (Aoki, F. et al., Therapeutic potential of follistatin to promote tissue regeneration and prevent tissue fibrosis. Endocr J. 2007 December; 54(6):849-54. Epub 2007 Oct. 15).

[0192] GDAs of the present invention may be designed to target such natural antagonists. These compositions would function to relieve signaling inhibition by blocking the inhibitor (natural antagonist) with the ultimate result being the release of the growth factor.

[0193] Natural antagonists which may be used to raise antibodies include those listed in Table 7.

TABLE 7
Natural Antagonist Targets

| | | Accession | SEQ |
|---|---|---|---|
| Name | Symbol | Number | ID NO |
| Dickkopf 1 homolog | DKK1 | NP_036374.1 | 176 |
| Secreted frizzled-related protein 1 | SFRP1 | NP_003003.3 | 266 |
| Chordin | CHRD | NP_003732.2 | 301 |
| Noggin | NOG | NP_005441.1 | 302 |
| Gremlin 1 | GREM1 | NP_037504.1 | 303 |
| Gremlin 2 | GREM2 | NP_071914.3 | 304 |
| Sclerostin | SOST | NP_079513.1 | 305 |
| Twisted gastrulation homolog 1 | TWSG1 | NP_065699.1 | 306 |
| Follistatin | FST | NP_037541.1 | 307 |
| Follistatin-like 1 | FSTL1 | NP_009016.1 | 308 |
| Follistatin-like 3 | FSTL3 | NP_005851.1 | 309 |
| Follistatin-like 4 | FSTL4 | NP_055897.1 | 310 |
| Follistatin-like 5 | FSTL5 | NP_064501.2 | 311 |
| Cerebrus 1 | CER1 | NP_005445.1 | 312 |
| Sclerostin domain containing 1 | SOSTDC1 | NP_056279.1 | 313 |
| DAN domain family, member 5 | DAND5 | NP_689867.1 | 314 |
| Neuroblastoma, suppression of | NBL1 | NP_877421.2 | 315 |
| tumorigenicity 1 | | | |
| BMP binding endothelial regulator | BMPER | NP_597725.1 | 316 |

### III. METHODS AND USES

### Therapeutics

[0194] Compositions and methods of the invention may be used to treat a wide variety of disorders and conditions. These include, but are not limited to, fibrosis, anemia of the aging, cancer, facilitation of rapid hematopoiesis following chemotherapy, bone healing, endothelial proliferation syndromes and the orphan indications Marfan's syndrome, Camurati-Engelmann disease. Efficacy of treatment or amelioration of disease can be assessed, for example by measuring disease progression, disease remission, symptom severity, reduction in pain, quality of life, dose of a medication required to sustain a treatment effect, level of a disease marker or any other measurable parameter appropriate for a given disease being treated or targeted for prevention. It is well within the ability of one skilled in the art to monitor efficacy of treatment or prevention by measuring any one of such parameters, or any combination of parameters. In connection with the administration of a GDA or pharmaceutical composition thereof, “effective against” for example a cancer, indicates that administration in a clinically appropriate manner results in a beneficial effect for at least a statistically significant fraction of patients, such as a improvement of symptoms, a cure, a reduction in disease load, reduction in tumor mass or cell numbers, extension of life, improvement in quality of life, or other effect generally recognized as positive by medical doctors familiar with treating the particular type of cancer.

[0195] A treatment or preventive effect is evident when there is a statistically significant improvement in one or more parameters of disease status, or by a failure to worsen or to develop symptoms where they would otherwise be anticipated. As an example, a favorable change of at least 10% in a measurable parameter of disease, and preferably at least 20%, 30%, 40%, 50% or more can be indicative of effective treatment. Efficacy for a given GDA drug or formulation of that drug can also be judged using an experimental animal model for the given disease as known in the art. When using an experimental animal model, efficacy of treatment is evidenced when a statistically significant change is observed.

### Therapeutics for Fibrosis

[0196] A major application of antagonists to TGF-beta is the treatment of fibrosis. TGF-beta is recognized as the central orchestrator of the fibrotic response.

[0197] One interesting aspect of fibrosis is that multiple members of the TGF-beta family can specifically antagonize each other's action. For instance, the BMP pathway can antagonize the effects of TGF-beta on fibrosis. BMPs are known to activate SMAD1, 5, and 8, in contrast to TGF-beta that activates SMAD2 and 3. These SMAD signaling transcription factors compete for the shared SMAD4 that dimerizes with each.

[0198] In models of experimental and renal fibrosis, TGF-beta is upregulated and BMP7 is downregulated. Even in a normal kidney, BMP7 has been shown to suppress fibronectin and collagen III. BMP7 appears to protect the kidney from fibrosis in several kidney damage models. Developing methods to induce BMP signal transduction may alter fibrosis.

[0199] Fibrosis is a common sequela of many types of tissue destructive diseases. When new space is created by the disruption of differentiated cells, progenitors or stem cells that normally occupy a niche in the tissue, the default pathway appears to be the proliferation of connective tissue cells, e.g. fibroblasts, to fill in the empty space. This is accompanied by the production of extracellular matrix constituents including collagens that result in scarring and permanent effacement of the tissue.

[0200] A difficult aspect of fibrosis is its chronicity, which may require continued therapy until the underlying destruction of parenchymal cells is terminated or the cells are replaced by stem cell pools, or by transplantation. Fibrosis is thought to be much easier to arrest than to reverse. The TGF-beta family is of central importance in regulating the growth of fibroblastic cells and the production of extracellular matrix constituents including collagen. Integrins αᵥβ₆ and αᵥβ₈ are required for activation of TGF-beta1 and 3. The integrin VLA-1 is a receptor for collagen and is expressed on lymphocytes only late after their activation and is strongly implicated in the development of fibrotic disease.

[0201] In some embodiments, GDA antibodies are designed to block integrin αᵥβ₆ activation of TGF-beta for inhibiting fibrosis. In some embodiments, GDA antibodies are designed to target interaction sites between GPCs and LTBP while leaving interaction sites between GPCs and GARP unaffected. Such GDA antibodies may act as inhibitory antibodies, preventing growth factor signaling and inhibiting fibrosis.

[0202] Assays useful in determining the efficacy of the GDAs for the treatment of fibrosis include histological assays for counting fibroblasts and basic immunohistochemical analyses known in the art.

[0203] Animal models are also available for analysis of the efficacy of GDAs in fibrosis treatment. On such model is the bleomycin induced lung injury model as described by Horan et al. (Horan G. S. et al., Partial inhibition of integrin alpha(v)beta6 prevents pulmonary fibrosis without exacerbating inflammation. Am J Respir Crit Care Med, 2008 Jan. 1; 177(1):56-65. Epub 2007 Oct. 4). In this model, SV129 mice are tracheally exposed to bleomycin which results in the development of lung fibrosis. With this model, potential therapeutics are administered through intraperitoneal injections while postmortem lung tissue or bronchoalveolar lavage collections can be assayed for levels of hydroxyproline as an indicator of fibrotic activity. Using the same technique, mice carrying a luciferase reporter gene, driven by the collagen Iα2 gene promoter may be used in the model so that fibrotic activity may be determined by luciferase activity assay as a function of collagen gene induction.

[0204] A well established model of renal fibrosis is the unilateral ureteral obstruction (UUO) model. In this model, mice are subjected to proximal ureteral ligation. After a period of hours to days, fibrosis is examined in the regions blocked by ligation. In one example, this method was utilized by Meng, X. M. et al. (Meng, X. M. et al., Smad2 Protects against TGF-beta/Smad3-Mediated Renal Fibrosis. J Am Soc Nephrol. 2010 September; 21(9):1477-87. Epub 2010 Jul. 1) to examine the role of Smad2 in renal fibrosis. Smad2 is an intracellular member of the TGF-beta cell signaling pathway.

### Therapeutics for Anemia, Thrombocytopenia and Neutropenia

[0205] In one embodiment, GDAs may be designed to treat patients suffering from anemia (the loss of red blood cells), thrombocytopenia (a decrease in the number of platelets) and/or neutropenia (a decrease in the number of neutrophils).

[0206] During chemotherapy, cell division is temporarily halted to prevent the growth and spread of cancerous cells. An unfortunate side effect is the loss of red blood cells, platelets and white blood cells which depend on active cell division of bone marrow cells. BMPs are important regulators of bone health and healing (Lissenberg-Thunnissen, S. N. et al. Use and efficacy of bone morphogenetic proteins in fracture healing. Int Orthop. 2011 September; 35(9):1271-80). GDAs of the present invention may function as BMP (preferably BMP2 and/or BMP7) agonists, thereby speeding up the recovery bone marrow cells and in turn, the production of neutrophil and platelet function after chemotherapy. Such GDAs may be important therapeutics for individuals undergoing chemotherapy or recovering from its effects.

[0207] A particularly interesting application for antagonizing BMP function is in the treatment of anemia of aging. Iron transport in the body is regulated by pathways studied for many years. Hepcidin is an acute phase protein that is aberrantly upregulated in chronic inflammation in the elderly and leads to iron imbalance. Hepcidin binds to the iron exporter ferroportin, and triggers the internalization of the exporter. Cells in many tissues are locked in a state of iron overload, and unable to deliver the iron to the erythron that requires it to make hemoglobin. Providing iron to these patients has no effect except to make the iron overload worse. Millions of patients have anemia of chronic disease, and no therapy is currently available. Hepcidin synthesis is signaled by BMP6 in conjunction with neogenin and hemojuvelin on liver cell surfaces (Zhang A. S. et al., Control of systemic iron homeostasis by the hemojuvelin-hepcidin axis. Adv Nutr. 2010 November; 1(1):38-45. Epub 2010 Nov. 16.). Hemojuvelin is a highly conserved protein that was only recently identified and to which few antibodies have been described. Its expression is limited to liver and skeletal muscle, in both of which it plays a role in iron regulation, with liver being the most important site.

[0208] Consequently, an antibody that would bind to hemojuvelin and block its interaction either with BMP6 or with neogenin would be a highly specific antagonist to prevent anemia of the aging. Such antibodies are contemplated herein.

[0209] Mouse as well as human models are known in the art to enable the optimization of such antibodies. Such models include diet-induced models of iron deficiency. In mice, restriction to an iron free diet and demineralized water for a period of 3 or more weeks is sufficient to induce iron deficiency (Kautz, L. et al., Iron regulates phosphorylation of Smad1/5/8 and gene expression of Bmp6, Smad7, Id1, and Atoh8 in the mouse liver. Blood. 2008 Aug. 15; 112(4):1503-9. Epub 2008 Jun. 6). Iron overload in mice can be induced through diet supplementation with carbonyl iron for a period of about 8 months. As an example, 3% carbonyl iron supplementation during this period results in about a 10-fold increase in serum iron concentration (Pigeon, C. et al., A new mouse liver-specific gene, encoding a protein homologous to human antimicrobial peptide hepcidin, is overexpressed during iron overload. J Biol Chem. 2001 Mar. 16; 276(11):7811-9. Epub 2000 Dec. 11).

[0210] Methods for studying elevated iron levels in humans are also available. One such study by Lin L, et al (Lin, L. et al., Iron transferrin regulates hepcidin synthesis in primary hepatocyte culture through hemojuvelin and BMP2/4. Blood. 2007 Sep. 15; 110(6):2182-9. Epub 2007 May 31) provided healthy volunteers with 65 mg of iron in the form of ferrous sulfate (Nature Made, Mission Hills, Calif.). Mouse strains with altered hepcidin expression are also known in the art and include the Bmp6-null (Bmp6^{m1Rob}) mouse (Andriopoulos, B. Jr. et al., BMP6 is a key endogenous regulator of hepcidin expression and iron metabolism. Nat Genet. 2009 April; 41(4):482-7. Epub 2009 Mar. 1) as well as the hemojuvelin-null (Hjv −/−) mouse (Huang, F. W. et al., A mouse model of juvenile hemochromatosis. J Clin Invest. 2005 August; 115(8):2187-91) that lack expression of BMP6 and hemojuvelin respectively. When compared with wildtype mice, young Bmp6-null mice exhibit a significant reduction (10-fold) in hepatic hepcidin mRNA levels and increased levels of serum iron. Hemojuvelin-null mice suffer from a rapid and systemic accumulation of iron. In addition, hepatic levels of hepcidin are downregulated.

[0211] For most BMPs, subsequent release of the growth factor would occur in the presence of receptors. Numerous proteins that antagonize BMPs could alternatively be targeted with inhibitory GDA antibodies, to activate BMP signaling.

[0212] Assays for the detection and or determination of efficacy of antibodies directed to BMP or hemojuvelin signaling include standard Smad signaling assays, measurement of iron metabolism, red cell indices, enzyme-linked immunosorbent assays (ELISA), gene and protein expression analyses, determining the shape of cells, hemoglobin content, and the like, each of which is known to those skilled in the art. Muscle wasting, satellite cell count and muscle mass determinations may also be used.

### Therapeutics for Cancer

[0213] Various cancers may be treated with the GDAs of the present invention. For example, a composition containing a GDA is used for treatment of a cancer. As used herein, cancer refers to any of various malignant neoplasms characterized by the proliferation of anaplastic cells that tend to invade surrounding tissue and metastasize to new body sites and also refers to the pathological condition characterized by such malignant neoplastic growths. A cancer can be a tumor or hematological malignancy, and includes but is not limited to, all types of lymphomas/leukemias, carcinomas and sarcomas, such as those cancers or tumors found in the anus, bladder, bile duct, bone, brain, breast, cervix, colon/rectum, endometrium, esophagus, eye, gallbladder, head and neck, liver, kidney, larynx, lung, mediastinum (chest), mouth, ovaries, pancreas, penis, prostate, skin, small intestine, stomach, spinal marrow, tailbone, testicles, thyroid and uterus.

[0214] Leukemias, or cancers of the blood or bone marrow that are characterized by an abnormal proliferation of white blood cells i.e., leukocytes, can be divided into four major classifications including Acute lymphoblastic leukemia (ALL), Chronic lymphocytic leukemia (CLL), Acute myelogenous leukemia or acute myeloid leukemia (AML) (AML with translocations between chromosome 10 and 11 [t(10, 11)], chromosome 8 and 21 [t(8; 21)], chromosome 15 and 17 [t(15; 17)], and inversions in chromosome 16 [inv(16)]; AML with multilineage dysplasia, which includes patients who have had a prior myelodysplastic syndrome (MDS) or myeloproliferative disease that transforms into AML; AML and myelodysplastic syndrome (MDS), therapy-related, which category includes patients who have had prior chemotherapy and/or radiation and subsequently develop AML or MDS; d) AML not otherwise categorized, which includes subtypes of AML that do not fall into the above categories; and e) Acute leukemias of ambiguous lineage, which occur when the leukemic cells cannot be classified as either myeloid or lymphoid cells, or where both types of cells are present); and Chronic myelogenous leukemia (CML).

[0215] The types of carcinomas include, but are not limited to, papilloma/carcinoma, choriocarcinoma, endodermal sinus tumor, teratoma, adenoma/adenocarcinoma, melanoma, fibroma, lipoma, leiomyoma, rhabdomyoma, mesothelioma, angioma, osteoma, chondroma, glioma, lymphoma/leukemia, squamous cell carcinoma, small cell carcinoma, large cell undifferentiated carcinomas, basal cell carcinoma and sinonasal undifferentiated carcinoma.

[0216] The types of sarcomas include, but are not limited to, soft tissue sarcoma such as alveolar soft part sarcoma, angiosarcoma, dermatofibrosarcoma, desmoid tumor, desmoplastic small round cell tumor, extraskeletal chondrosarcoma, extraskeletal osteosarcoma, fibrosarcoma, hemangiopericytoma, hemangiosarcoma, Kaposi's sarcoma, leiomyosarcoma, liposarcoma, lymphangiosarcoma, lymphosarcoma, malignant fibrous histiocytoma, neurofibrosarcoma, rhabdomyosarcoma, synovial sarcoma, and Askin's tumor, Ewing's sarcoma (primitive neuroectodermal tumor), malignant hemangioendothelioma, malignant schwannoma, osteosarcoma, and chondrosarcoma.

[0217] The invention further relates to the use of a GDA or a pharmaceutical composition thereof, e.g., for treating a cancer, in combination with other pharmaceuticals and/or other therapeutic methods, e.g., with known pharmaceuticals and/or known therapeutic methods, such as, for example, those which are currently employed for treating these disorders. For example, the GDA or pharmaceutical composition thereof can also be administered in conjunction with one or more additional anti-cancer treatments, such as biological, chemotherapy and radiotherapy. Accordingly, a treatment can include, for example, imatinib (Gleevac), all-trans-retinoic acid, a monoclonal antibody treatment (gemtuzumab, ozogamicin), chemotherapy (for example, chlorambucil, prednisone, prednisolone, vincristine, cytarabine, clofarabine, farnesyl transferase inhibitors, decitabine, inhibitors of MDR1), rituximab, interferon-α, anthracycline drugs (such as daunorubicin or idarubicin), L-asparaginase, doxorubicin, cyclophosphamide, doxorubicin, bleomycin, fludarabine, etoposide, pentostatin, or cladribine), bone marrow transplant, stem cell transplant, radiation therapy, anti-metabolite drugs (methotrexate and 6-mercaptopurine), or any combination thereof.

[0218] Radiation therapy (also called radiotherapy, X-ray therapy, or irradiation) is the use of ionizing radiation to kill cancer cells and shrink tumors. Radiation therapy can be administered externally via external beam radiotherapy (EBRT) or internally via brachytherapy. The effects of radiation therapy are localized and confined to the region being treated. Radiation therapy may be used to treat almost every type of solid tumor, including cancers of the brain, breast, cervix, larynx, lung, pancreas, prostate, skin, stomach, uterus, or soft tissue sarcomas. Radiation is also used to treat leukemia and lymphoma.

[0219] Chemotherapy is the treatment of cancer with drugs that can destroy cancer cells. In current usage, the term “chemotherapy” usually refers to cytotoxic drugs which affect rapidly dividing cells in general, in contrast with targeted therapy. Chemotherapy drugs interfere with cell division in various possible ways, e.g. with the duplication of DNA or the separation of newly formed chromosomes. Most forms of chemotherapy target all rapidly dividing cells and are not specific to cancer cells, although some degree of specificity may come from the inability of many cancer cells to repair DNA damage, while normal cells generally can.

[0220] Most chemotherapy regimens are given in combination. Exemplary chemotherapeutic agents include, but are not limited to, 5-FU Enhancer, 9-AC, AG2037, AG3340, Aggrecanase Inhibitor, Aminoglutethimide, Amsacrine (m-AMSA), Asparaginase, Azacitidine, Batimastat (BB94), BAY 12-9566, BCH-4556, Bis-Naphtalimide, Busulfan, Capecitabine, Carboplatin, Carmustaine+Polifepr Osan, cdk4/cdk2 inhibitors, Chlorombucil, CI-994, Cisplatin, Cladribine, CS-682, Cytarabine HCl, D2163, Dactinomycin, Daunorubicin HCl, DepoCyt, Dexifosamide, Docetaxel, Dolastain, Doxifluridine, Doxorubicin, DX8951f, E 7070, EGFR, Epirubicin, Erythropoietin, Estramustine phosphate sodium, Etoposide (VP16-213), Farnesyl Transferase Inhibitor, FK 317, Flavopiridol, Floxuridine, Fludarabine, Fluorouracil (5-FU), Flutamide, Fragyline, Gemcitabine, Hexamethylmelamine (HMM), Hydroxyurea (hydroxycarbamide), Ifosfamide, Interferon Alfa-2a, Interferon Alfa-2b, Interleukin-2, Irinotecan, ISI 641, Krestin, Lemonal DP 2202, Leuprolide acetate (LHRH-releasing factor analogue), Levamisole, LiGLA (lithium-gamma linolenate), Lodine Seeds, Lometexol, Lomustine (CCNU), Marimistat, Mechlorethamine HCl (nitrogen mustard), Megestrol acetate, Meglamine GLA, Mercaptopurine, Mesna, Mitoguazone (methyl-GAG; methyl glyoxal bis-guanylhydrazone; MGBG), Mitotane (o.p′-DDD), Mitoxantrone, Mitoxantrone HCl, MMI 270, MMP, MTA/LY 231514, Octreotide, ODN 698, OK-432, Oral Platinum, Oral Taxoid, Paclitaxel (TAXOL®), PARP Inhibitors, PD 183805, Pentostatin (2′ deoxycoformycin), PKC 412, Plicamycin, Procarbazine HCl, PSC 833, Ralitrexed, RAS Farnesyl Transferase Inhibitor, RAS Oncogene Inhibitor, Semustine (methyl-CCNU), Streptozocin, Suramin, Tamoxifen citrate, Taxane Analog, Temozolomide, Teniposide (VM-26), Thioguanine, Thiotepa, Topotecan, Tyrosine Kinase, UFT (Tegafur/Uracil), Valrubicin, Vinblastine sulfate, Vindesine sulfate, VX-710, VX-853, YM 116, ZD 0101, ZD 0473/Anormed, ZD 1839, ZD 9331.

[0221] Biological therapies use the body's immune system, either directly or indirectly, to fight cancer or to lessen the side effects that may be caused by some cancer treatments. In one sense, GDAs can be considered in this group of therapies in that it can stimulate immune system action against a tumor, for example. However, this approach can also be considered with other such biological approaches, e.g., immune response modifying therapies such as the administration of interferons, interleukins, colony-stimulating factors, other monoclonal antibodies, vaccines, gene therapy, and nonspecific immunomodulating agents are also envisioned as anti-cancer therapies to be combined with the GDAs.

[0222] Small molecule targeted therapy drugs are generally inhibitors of enzymatic domains on mutated, overexpressed, or otherwise critical proteins within the cancer cell, such as tyrosine kinase inhibitors imatinib (Gleevec/Glivec) and gefitinib (Iressa). Examples of monoclonal antibody therapies that can be used with a GDA or pharmaceutical composition thereof include, but are not limited to, the anti-HER2/neu antibody trastuzumab (Herceptin) used in breast cancer, and the anti-CD20 antibody rituximab, used in a variety of B-cell malignancies. The growth of some cancers can be inhibited by providing or blocking certain hormones. Common examples of hormone-sensitive tumors include certain types of breast and prostate cancers. Removing or blocking estrogen or testosterone is often an important additional treatment. In certain cancers, administration of hormone agonists, such as progestogens may be therapeutically beneficial.

[0223] Cancer immunotherapy refers to a diverse set of therapeutic strategies designed to induce the patient's own immune system to fight the tumor, and include, but are not limited to, intravesical BCG immunotherapy for superficial bladder cancer, vaccines to generate specific immune responses, such as for malignant melanoma and renal cell carcinoma, and the use of Sipuleucel-T for prostate cancer, in which dendritic cells from the patient are loaded with prostatic acid phosphatase peptides to induce a specific immune response against prostate-derived cells.

[0224] In some embodiments, GDA antibodies are designed to prevent T cell inhibition. Such antibodies may prevent the dissociation of growth factors from the prodomain of the GPC or from ECCM components including, but not limited to GARP.

### Therapeutics for Bone Healing

[0225] The GDA compositions of the present invention may be used to treat bone disorders and/or improve bone healing or repair. Cellular remodeling of bone is a lifelong process that helps to maintain skeletal integrity. This process involves cycles of osteoclastic bone resorption and new bone formation that function to repair defects and areas of weakness in bone. TGF-beta family members, preferably BMPs, are thought to be important factors in coupling the processes of resorption and formation by osteoclasts. TGF-beta family members are prevalent in the bone matrix and upregulated by bone injury. TGF-beta family members are also believed to impart strength to the fully formed bone matrix, imparting resistance to fracture. The role of TGF-beta family members in bone remodeling makes them attractive targets for potential therapeutics to treat bone disorder and disease.

[0226] Numerous diseases and disorders affect bones and joints. Such diseases and disorders may be congenital, genetic and/or acquired. Such diseases and disorders include, but are not limited to, bone cysts, infectious arthritis, Paget's disease of the bone, Osgood-Schlatter disease, Kohler's bone disease, bone spurs (osteophytes), bone tumors, craniosynostosis, fibrodysplasia ossificans progressive, fibrous dysplasia, giant cell tumor of bone, hypophosphatasia, Klippel-Feil syndrome, metabolic bone disease, osteoarthritis, osteitis deformans, osteitis fibrosa cystica, osteitis pubis, condensing osteitis, osteitis condensans ilii, osteochondritis dissecans, osteochondroma, osteogenesis imperfecta, osteomalacia, osteomyelitis, osteopenia, osteopetrosis, osteoporosis, osteosarcoma, porotic hyperostosis, primary hyperparathyroidism, renal osteodystrophy and water on the knee.

[0227] Mouse models for evaluating the effectiveness of therapeutics on bone development and repair are well known in the art. In one such model demonstrated by Mohammad, et al. (Mohammad, K. S. et al., Pharmacologic inhibition of the TGF-beta type I receptor kinase has anabolic and anti-catabolic effects on bone. PLoS One. 2009; 4(4):e5275. Epub 2008 Apr. 16), inhibition of the TGF-beta type I receptor was carried out in C57B1/6 mice through twice daily administration of a potent inhibitor, SD-208, by gavage. Subsequently, bone mineral density (BMD) was analyzed using a PIXImus mouse densitometer (GE Lunar II, Faxitron Corp., Wheeling, Ill.). Changes in BMD are expressed as a percentage change in the area scanned. The study found that after 6 weeks of treatment, male mice exhibited a 4.12% increase in bone accrual while female mice exhibited a 5.2% increase.

[0228] GDAs of the present invention may be directed toward therapies for simple and complex bone fractures and/or bone repair. In such treatments, GDAs may be introduced to the site of injury directly or through the incorporation into implantation devices and coated biomatrices. Additionally, treatments are contemplated in which a GDA is supplied together with its GPC in a treatment area and facilitates the slow release of growth factors from the GPCs.

### Therapeutics for Angiogenic and Endothelial Proliferation Conditions

[0229] The GDA compositions of the present invention may be used to treat angiogenic and endothelial proliferation syndromes, diseases or disorders. The term “angiogenesis”, as used herein refers to the formation and/or reorganization of new blood vessels. Angiogenic disease involves the loss of control over angiogenesis in the body. In such cases, blood vessel growth, formation or reorganization may be overactive (including during tumor growth and cancer where uncontrolled cell growth requires increases blood supply) or insufficient to sustain healthy tissues. Such conditions may include, but are not limited to angiomas, angiosarcomas, telangiectasia, lymphangioma, congenital vascular anomalies, tumor angiogenesis and vascular structures after surgery. Excessive angiogenesis is noted in cancer, macular degeneration, diabetic blindness, rheumatoid arthritis, psoriasis as well as many other conditions. Excessive angiogenesis is often promoted by excessive angiogenic growth factor expression. GDAs of the present invention may act to block growth factors involved in excessive angiogenesis. Alternatively, GDAs of the present invention may be utilized to promote growth factor signaling to enhance angiogenesis in conditions where angiogenesis is inhibited. Such conditions include, but are not limited to coronary artery disease, stroke, diabetes and chronic wounds.

### Therapeutics for Orphan Indications and Diseases

[0230] The GDA compositions of the present invention may be used to treat orphan indications and/or diseases. Such diseases include Marfan's syndrome. This syndrome is a connective tissue disorder, effecting bodily growth and development. Tissues and organs that are most severely compromised include the heart, blood vessels, bones, eyes, lungs and connective tissue surrounding the spinal chord. Unfortunately, the effects can be life threatening. Marfan's syndrome is caused by a genetic mutation in the gene that produces fibrillin, a major component of bodily connective tissue. Latent TGF-beta binding protein (LTBP) is an important regulator of TGF-beta signaling that exhibits close identity to fibrillin protein family members. Functional LTBP is required for controlling the release of active TGF-beta (Oklu, R. et al., The latent transforming growth factor beta binding protein (LTBP) family. Biochem J. 2000 Dec. 15; 352 Pt 3:601-10). In this embodiment, GDA compositions are designed to alter the release profile of TGF-beta. In such cases, the GDA antibody would be an inhibitory antibody.

[0231] Another indication is Camurati-Engelmann disease (CED). This disease primarily affects the bones, resulting in increased bone density. Especially affected are the long bones of the legs and arms; however, the bones of the skill and hips can also be affected. The disease results in leg and arm pain as well as a variety of other symptoms. CED is very rare, reported in approximately 200 individuals worldwide and is caused by a mutation in the TGF-beta gene. TGF-beta produced in the bodies of these individuals has a defective prodomain, leading to overactive TGF-beta signaling (Janssens, K. et al., Transforming growth factor-beta 1 mutations in Camurati-Engelmann disease lead to increased signaling by altering either activation or secretion of the mutant protein. J Biol Chem. 2003 Feb. 28; 278(9):7718-24. Epub 2002 Dec. 18). As described by Shi et al., (Shi, M. et al., Latent TGF-beta structure and activation. Nature. 2011 Jun. 15; 474(7351):343-9. doi: 10.1038/nature10152), among CED mutations, Y52H disrupts an α2-helix residue that cradles the TGF-beta fingers. The charge-reversal E140K and H193D mutations disrupt a pH-regulated salt bridge between Glu 140 and His 193 in the dimerization interface of the prodomain. Residue Arg 189 is substantially buried: it forms a cation-π bond with Tyr 142 and salt bridges across the dimer interface with residue Asp 197 of the ‘bowtie’ region of the growth-factor prodomain complex (GPC). Moreover, CED mutations in Cys 194 and Cys 196 demonstrate the importance of disulphide bonds in the bowtie region for holding TGF-beta in inactive form. In this embodiment, an inhibitory GDA antibody would serve to alleviate symptoms. Also in this embodiment, administration would be to the neonate subject.

[0232] In yet another embodiment, GDA antibodies are designed to treat hereditary hemorrhagic telangiectasia (HHT), a genetic blood vessel disorder affecting about 1 in 5,000 people. The mutated genes in HHT are modulators of TGF-beta signaling in the vascular endothelium. Affected individuals develop abnormal vascular structures ranging from dilated microvessels to enlarged arteriovenous malformations. The fragile walls of these vessels leave them susceptible to hemorrhage (Govani, F. S. et al., Hereditary haemorrhagic telangiectasia: a clinical and scientific review. Eur J Hum Genet. 2009 July; 17(7):860-71. Epub 2009 Apr. 1). In one form of the disorder, HHT is caused by a mutation in activin receptor-like kinase 1 (ALK1), an endothelial-specific TGF-beta type 1 receptor. The physiological ligand for this receptor is a TGF-beta family member, BMP9. Overexpression of BMP9 has been shown to reduce endothelial cell migration. In one embodiment, symptoms of HHT would be alleviated by altering BMP9 signaling.

### Therapeutics for Immune and Autoimmune Diseases and Disorders

[0233] The GDA compositions of the present invention may be used to treat immune and autoimmune disorders. Such disorders include, but are not limited to Acute Disseminated Encephalomyelitis (ADEM), Acute necrotizing hemorrhagic leukoencephalitis, Addison's disease, Agammaglobulinemia, Alopecia areata, Amyloidosis, Ankylosing spondylitis, Anti-GBM/Anti-TBM nephritis, Antiphospholipid syndrome (APS), Autoimmune angioedema, Autoimmune aplastic anemia, Autoimmune dysautonomia, Autoimmune hepatitis, Autoimmune hyperlipidemia, Autoimmune immunodeficiency, Autoimmune inner ear disease (AIED), Autoimmune myocarditis, Autoimmune pancreatitis, Autoimmune retinopathy, Autoimmune thrombocytopenic purpura (ATP), Autoimmune thyroid disease, Autoimmune urticaria, Axonal & neuronal neuropathies, Balo disease, Behçet's disease, Bullous pemphigoid, Cardiomyopathy, Castleman disease, Celiac disease, Chagas disease, Chronic fatigue syndrome, Chronic inflammatory demyelinating polyneuropathy (CIDP), Chronic recurrent multifocal ostomyelitis (CRMO), Churg-Strauss syndrome, Cicatricial pemphigoid/benign mucosal pemphigoid, Crohn's disease, Cogans syndrome, Cold agglutinin disease, Congenital heart block, Coxsackie myocarditis, CREST disease, Essential mixed cryoglobulinemia, Demyelinating neuropathies, Dermatitis herpetiformis, Dermatomyositis, Devic's disease (neuromyelitis optica), Diabetes Type I, Discoid lupus, Dressler's syndrome, Endometriosis, Eosinophilic esophagitis, Eosinophilic fasciitis, Erythema nodosum, Experimental allergic encephalomyelitis, Evans syndrome, Fibromyalgia, Fibrosing alveolitis, Giant cell arteritis (temporal arteritis), Glomerulonephritis, Goodpasture's syndrome, Granulomatosis with Polyangiitis (GPA) see Wegener's, Graves' disease, Guillain-Barre syndrome, Hashimoto's encephalitis, Hashimoto's thyroiditis, Hemolytic anemia, Henoch-Schonlein purpura, Herpes gestationis, Hypogammaglobulinemia, Idiopathic thrombocytopenic purpura (ITP), IgA nephropathy, IgG4-related sclerosing disease, Immunoregulatory lipoproteins, Inclusion body myositis, Insulin-dependent diabetes (type1), Interstitial cystitis, Juvenile arthritis, Juvenile diabetes, Kawasaki syndrome, Lambert-Eaton syndrome, Large vessel vasculopathy, Leukocytoclastic vasculitis, Lichen planus, Lichen sclerosus, Ligneous conjunctivitis, Linear IgA disease (LAD), Lupus (SLE), Lyme disease, chronic, Meniere's disease, Microscopic polyangiitis, Mixed connective tissue disease (MCTD), Mooren's ulcer, Mucha-Habermann disease, Multiple endocrine neoplasia syndromes, Multiple sclerosis, Myositis, Myasthenia gravis, Narcolepsy, Neuromyelitis optica (Devic's), Neutropenia, Ocular cicatricial pemphigoid, Optic neuritis, Palindromic rheumatism, PANDAS (Pediatric Autoimmune Neuropsychiatric Disorders Associated with Streptococcus), Paraneoplastic cerebellar degeneration, Paroxysmal nocturnal hemoglobinuria (PNH), Parry Romberg syndrome, Parsonnage-Turner syndrome, Pars planitis (peripheral uveitis), Pemphigus, Peripheral neuropathy, Perivenous encephalomyelitis, Pernicious anemia, POEMS syndrome, Polyarteritis nodosa, Type I, II, & III autoimmune polyglandular syndromes, Polyendocrinopathies, Polymyalgia rheumatica, Polymyositis, Postmyocardial infarction syndrome, Postpericardiotomy syndrome, Progesterone dermatitis, Primary biliary cirrhosis, Primary sclerosing cholangitis, Psoriasis, Psoriatic arthritis, Idiopathic Pulmonary fibrosis, Pyoderma gangrenosum, Pure red cell aplasia, Raynauds phenomenon, Reactive arthritis, Reflex sympathetic dystrophy, Reiter's syndrome, Relapsing polychondritis, Restless legs syndrome, Retroperitoneal fibrosis, Rheumatic fever, Rheumatoid arthritis, Sarcoidosis, Schmidt syndrome, Scleritis, Scleroderma, Sjogren's syndrome, Small vessel vasculopathy, Sperm & testicular autoimmunity, Stiff person syndrome, Subacute bacterial endocarditis (SBE), Susac's syndrome, Sympathetic ophthalmia, Takayasu's arteritis, Temporal arteritis/Giant cell arteritis, Thrombocytopenic purpura (TTP), Tolosa-Hunt syndrome, Transverse myelitis, Tubular autoimmune disorder, Ulcerative colitis, Undifferentiated connective tissue disease (UCTD), Uveitis, Vesiculobullous dermatosis, Vasculitis, Vitiligo and Wegener's granulomatosis (also known as Granulomatosis with Polyangiitis (GPA)).

[0234] TGF-beta plays an active role in leukocyte differentiation, proliferation and activation making it an important factor in immune and autoimmune diseases. Additionally, TGF-beta promotes chemotaxis of leukocytes and influences adhesion molecule-mediated localization. A role for TGF-beta in cardiac, pulmonary and gastric inflammation has been demonstrated. Furthermore, Smad3-deficient mice are prone to chronic mucosal infections as a result of T-cell activation impairment and reduced mucosal immunity (Blobe, G. C. et al., Role of transforming growth factor beta in human disease. N Engl J Med. 2000 May 4; 342(18):1350-8). As an immunosuppressant, TGF-beta has been shown to both inhibit the function of inflammatory cells as well as enhance the function of regulatory T cells. Recent studies have shown that the latent TGF-beta growth factor prodomain complex (GPC) binds to regulatory T cells through an interaction with the Glycoprotein-A repetitions anonymous protein (GARP). This interaction provides the platform necessary to release active TGF-beta from the GPC in an integrin-dependent manner (Wang, R. et al., GARP regulates the bioavailability and activation of TGFβ. Mol Biol Cell. 2012 March; 23(6):1129-39. Epub 2012 Jan. 25). In one embodiment, a GDA may be used for the treatment of an immune or autoimmune disorder. In another embodiment, a GDA may specifically target GARP-bound GPC, GARP or the interaction site between GARP and the GPC. In one embodiment, GDA antibodies are designed to promote release of growth factors (including, but not limited to TGF-beta) from GARP-bound GPCs while not affecting growth factor release from LTBP-bound GPCs. Treatment of immune and autoimmune disorders with the GDA compositions may be in combination with standard of care (SOC) or synergistic combinations or with companion diagnostics.

### Therapeutics for Infectious Agents

[0235] The invention further relates to the use of a GDA for treatment of an infectious disease or disorder, for example, in a subject having an infection. In some preferred embodiments the subject has an infection or is at risk of having an infection. An “infection” as used herein refers to a disease or condition attributable to the presence in a host of a foreign organism or agent that reproduces within the host. Infections typically involve breach of a normal mucosal or other tissue barrier by an infectious organism or agent. A subject that has an infection is a subject having objectively measurable infectious organisms or agents present in the subject's body. A subject at risk of having an infection is a subject that is predisposed to develop an infection. Such a subject can include, for example, a subject with a known or suspected exposure to an infectious organism or agent. A subject at risk of having an infection also can include a subject with a condition associated with impaired ability to mount an immune response to an infectious organism or agent, e.g., a subject with a congenital or acquired immunodeficiency, a subject undergoing radiation therapy or chemotherapy, a subject with a burn injury, a subject with a traumatic injury, a subject undergoing surgery or other invasive medical or dental procedure.

[0236] Infections are broadly classified as bacterial, viral, fungal, or parasitic based on the category of infectious organism or agent involved. Other less common types of infection are also known in the art, including, e.g., infections involving rickettsiae, mycoplasmas, and agents causing scrapie, bovine spongiform encephalopathy (BSE), and prion diseases (e.g., kuru and Creutzfeldt-Jacob disease). Examples of bacteria, viruses, fungi, and parasites which cause infection are well known in the art. An infection can be acute, subacute, chronic, or latent, and it can be localized or systemic. As defined herein, a “chronic infection” refers to those infections that are not cleared by the normal actions of the innate or adaptive immune responses and persist in the subject for a long duration of time, on the order of weeks, months, and years. A chronic infection may reflect latency of the infectious agent, and may be include periods in which no infectious symptoms are present, i.e., asymptomatic periods. Examples of chronic infections include, but are not limited to, HIV infection and herpesvirus infections. Furthermore, an infection can be predominantly intracellular or extracellular during at least one phase of the infectious organism's or agent's life cycle in the host.

[0237] Exemplary viruses include, but are not limited to: Retroviridae (e.g., human immunodeficiency viruses, such as HIV-1 (also referred to as HTLV-III), HIV-2, LAV or HTLV-III/LAV, or HIV-III, and other isolates, such as HIV-LP; Picornaviridae (e.g., polio viruses, hepatitis A virus; enteroviruses, human Coxsackie viruses, rhinoviruses, echoviruses); Calciviridae (e.g., strains that cause gastroenteritis); Togaviridae (e.g., equine encephalitis viruses, rubella viruses); Flaviviridae (e.g., dengue viruses, encephalitis viruses, yellow fever viruses); Coronaviridae (e.g., coronaviruses); Rhabdoviridae (e.g., vesicular stomatitis viruses, rabies viruses); Filoviridae (e.g., ebola viruses); Paramyxoviridae (e.g., parainfluenza viruses, mumps virus, measles virus, respiratory syncytial virus); adenovirus; Orthomyxoviridae (e.g., influenza viruses); Bungaviridae (e.g., Hantaan viruses, bunga viruses, phleboviruses and Nairo viruses); Arena viridae (hemorrhagic fever viruses); Reoviridae (e.g., reoviruses, orbiviurses and rotaviruses, i.e., Rotavirus A, Rotavirus B. Rotavirus C); Birnaviridae; Hepadnaviridae (Hepatitis A and B viruses); Parvoviridae (parvoviruses); Papovaviridae (papilloma viruses, polyoma viruses); Adenoviridae (most adenoviruses); Herpesviridae (herpes simplex virus (HSV) 1 and 2, Human herpes virus 6, Human herpes virus 7, Human herpes virus 8, varicella zoster virus, cytomegalovirus (CMV), herpes virus; Epstein-Barr virus; Rous sarcoma virus; West Nile virus; Japanese equine encephalitis, Norwalk, papilloma virus, parvovirus B19; Poxyiridae (variola viruses, vaccinia viruses, pox viruses); and Iridoviridae (e.g., African swine fever virus); Hepatitis D virus, Hepatitis E virus, and unclassified viruses (e.g., the etiological agents of Spongiform encephalopathies, the agent of delta hepatitis (thought to be a defective satellite of hepatitis B virus), the agents of non-A, non-B hepatitis (class 1=enterally transmitted; class 2=parenterally transmitted (i.e., Hepatitis C); Norwalk and related viruses, and astroviruses).

[0238] Bacteria include both Gram negative and Gram positive bacteria. Examples of Gram positive bacteria include, but are not limited to Pasteurella species, Staphylococci species, and Streptococcus species. Examples of Gram negative bacteria include, but are not limited to, Escherichia coli, Pseudomonas species, and Salmonella species. Specific examples of infectious bacteria include but are not limited to: Helicobacter pyloris, Borrelia burgdorferi, Legionella pneumophilia, Mycobacteria spp. (e.g., M. tuberculosis, M. avium, M. intracellulare, M. kansasii, M. gordonae, M. leprae), Staphylococcus aureus, Neisseria gonorrhoeae, Neisseria meningitidis, Listeria monocytogenes, Streptococcus pyogenes (Group A Streptococcus), Streptococcus agalactiae (Group B Streptococcus), Streptococcus (viridans group), Streptococcus faecalis, Streptococcus bovis, Streptococcus (anaerobic spp.), Streptococcus pneumoniae, pathogenic Campylobacter spp., Enterococcus spp., Haemophilus influenzae (Hemophilus influenza B, and Hemophilus influenza non-typable), Bacillus anthracis, Corynebacterium diphtheriae, Corynebacterium spp., Erysipelothrix rhusiopathiae, Clostridium perfringens, Clostridium tetani, Enterobacter aerogenes, Klebsiella pneumoniae, Pasteurella multocida, Bacteroides spp., Fusobacterium nucleatum, Streptobacillus moniliformis, Treponema pallidum, Treponema pertenue, Leptospira, Rickettsia, Actinomyces israelii, meningococcus, pertussis, pneumococcus, shigella, tetanus, Vibrio cholerae, yersinia, Pseudomonas species, Clostridia species, Salmonella typhi, Shigella dysenteriae, Yersinia pestis, Brucella species, Legionella pneumophila, Rickettsiae, Chlamydia, Clostridium perfringens, Clostridium botulinum, Staphylococcus aureus, Pseudomonas aeruginosa, Cryptosporidium parvum, Streptococcus pneumoniae, and Bordetella pertussis.

[0239] Exemplary fungi and yeast include, but are not limited to, Cryptococcus neoformans, Candida albicans, Candida tropicalis, Candida stellatoidea, Candida glabrata, Candida krusei, Candida parapsilosis, Candida guilliermondii, Candida viswanathii, Candida lusitaniae, Rhodotorula mucilaginosa, Aspergillus fumigatus, Aspergillus flavus, Blastomyces dermatitidis, Aspergillus clavatus, Cryptococcus neoformans, Chlamydia trachomatis, Coccidioides immitis, Cryptococcus laurentii, Cryptococcus albidus, Cryptococcus gattii, Nocardia spp, Histoplasma capsulatum, Pneumocystis jirovecii (or Pneumocystis carinii), Stachybotrys chartarum, and any combination thereof.

[0240] Exemplary parasites include, but are not limited to: Entamoeba histolytica; Plasmodium species (Plasmodium falciparum, Plasmodium malariae, Plasmodium ovale, Plasmodium vivax), Leishmania species (Leishmania tropica, Leishmania braziliensis, Leishmania donovani), Toxoplasmosis (Toxoplasma gondii), Trypanosoma gambiense, Trypanosoma rhodesiense (African sleeping sickness), Trypanosoma cruzi (Chagas' disease), Helminths (flat worms, round worms), Babesia microti, Babesia divergens, Giardia lamblia, and any combination thereof.

[0241] The invention further relates to the use of a GDA for the treatment of an infectious disease, such as hepatitis B or a chronic bacterial infection, in combination with other pharmaceuticals and/or other therapeutic methods, e.g., with known pharmaceuticals and/or known therapeutic methods, such as, for example, those which are currently employed for treating such infectious diseases or disorders (e.g., antibiotics, anti-viral agents). For example, in certain embodiments, a GDA is administered in combination with an antibacterial agent. Examples of anti-bacterial agents useful for the methods described herein include, but are not limited to, natural penicillins, semi-synthetic penicillins, clavulanic acid, cephalolsporins, bacitracin, ampicillin, carbenicillin, oxacillin, azlocillin, mezlocillin, piperacillin, methicillin, dicloxacillin, nafcillin, cephalothin, cephapirin, cephalexin, cefamandole, cefaclor, cefazolin, cefuroxine, cefoxitin, cefotaxime, cefsulodin, cefetamet, cefixime, ceftriaxone, cefoperazone, ceftazidine, moxalactam, carbapenems, imipenems, monobactems, eurtreonam, vancomycin, polymyxin, amphotericin B, nystatin, imidazoles, clotrimazole, miconazole, ketoconazole, itraconazole, fluconazole, rifampins, ethambutol, tetracyclines, chloramphenicol, macrolides, aminoglycosides, streptomycin, kanamycin, tobramycin, amikacin, gentamicin, tetracycline, minocycline, doxycycline, chlortetracycline, erythromycin, roxithromycin, clarithromycin, oleandomycin, azithromycin, chloramphenicol, quinolones, co-trimoxazole, norfloxacin, ciprofloxacin, enoxacin, nalidixic acid, temafloxacin, sulfonamides, gantrisin, and trimethoprim; Acedapsone; Acetosulfone Sodium; Alamecin; Alexidine; Amdinocillin; Amdinocillin Pivoxil; Amicycline; Amifloxacin; Amifloxacin Mesylate; Amikacin; Amikacin Sulfate; Aminosalicylic acid; Aminosalicylate sodium; Amoxicillin; Amphomycin; Ampicillin; Ampicillin Sodium; Apalcillin Sodium; Apramycin; Aspartocin; Astromicin Sulfate; Avilamycin; Avoparcin; Azithromycin; Azlocillin; Azlocillin Sodium; Bacampicillin Hydrochloride; Bacitracin; Bacitracin Methylene Disalicylate; Bacitracin Zinc; Bambermycins; Benzoylpas Calcium; Berythromycin; Betamicin Sulfate; Biapenem; Biniramycin; Biphenamine Hydrochloride; Bispyrithione Magsulfex; Butikacin; Butirosin Sulfate; Capreomycin Sulfate; Carbadox; Carbenicillin Disodium; Carbenicillin Indanyl Sodium; Carbenicillin Phenyl Sodium; Carbenicillin Potassium; Carumonam Sodium; Cefaclor; Cefadroxil; Cefamandole; Cefamandole Nafate; Cefamandole Sodium; Cefaparole; Cefatrizine; Cefazaflur Sodium; Cefazolin; Cefazolin Sodium; Cefbuperazone; Cefdinir; Cefepime; Cefepime Hydrochloride; Cefetecol; Cefixime; Cefinenoxime Hydrochloride; Cefinetazole; Cefinetazole Sodium; Cefonicid Monosodium; Cefonicid Sodium; Cefoperazone Sodium; Ceforanide; Cefotaxime Sodium; Cefotetan; Cefotetan Disodium; Cefotiam Hydrochloride; Cefoxitin; Cefoxitin Sodium; Cefpimizole; Cefpimizole Sodium; Cefpiramide; Cefpiramide Sodium; Cefpirome Sulfate; Cefpodoxime Proxetil; Cefprozil; Cefroxadine; Cefsulodin Sodium; Ceftazidime; Ceftibuten; Ceftizoxime Sodium; Ceftriaxone Sodium; Cefuroxime; Cefuroxime Axetil; Cefuroxime Pivoxetil; Cefuroxime Sodium; Cephacetrile Sodium; Cephalexin; Cephalexin Hydrochloride; Cephaloglycin; Cephaloridine; Cephalothin Sodium; Cephapirin Sodium; Cephradine; Cetocycline Hydrochloride; Cetophenicol; Chloramphenicol; Chloramphenicol Palmitate; Chloramphenicol Pantothenate Complex; Chloramphenicol Sodium Succinate; Chlorhexidine Phosphanilate; Chloroxylenol; Chlortetracycline Bisulfate; Chlortetracycline Hydrochloride; Cinoxacin; Ciprofloxacin; Ciprofloxacin Hydrochloride; Cirolemycin; Clarithromycin; Clinafloxacin Hydrochloride; Clindamycin; Clindamycin Hydrochloride; Clindamycin Palmitate Hydrochloride; Clindamycin Phosphate; Clofazimine; Cloxacillin Benzathine; Cloxacillin Sodium; Cloxyquin; Colistimethate Sodium; Colistin Sulfate; Coumermycin; Coumermycin Sodium; Cyclacillin; Cycloserine; Dalfopristin; Dapsone; Daptomycin; Demeclocycline; Demeclocycline Hydrochloride; Demecycline; Denofungin; Diaveridine; Dicloxacillin; Dicloxacillin Sodium; Dihydrostreptomycin Sulfate; Dipyrithione; Dirithromycin; Doxycycline; Doxycycline Calcium; Doxycycline Fosfatex; Doxycycline Hyclate; Droxacin Sodium; Enoxacin; Epicillin; Epitetracycline Hydrochloride; Erythromycin; Erythromycin Acistrate; Erythromycin Estolate; Erythromycin Ethylsuccinate; Erythromycin Gluceptate; Erythromycin Lactobionate; Erythromycin Propionate; Erythromycin Stearate; Ethambutol Hydrochloride; Ethionamide; Fleroxacin; Floxacillin; Fludalanine; Flumequine; Fosfomycin; Fosfomycin Tromethamine; Fumoxicillin; Furazolium Chloride; Furazolium Tartrate; Fusidate Sodium; Fusidic Acid; Gentamicin Sulfate; Gloximonam; Gramicidin; Haloprogin; Hetacillin; Hetacillin Potassium; Hexedine; Ibafloxacin; Inipenem; Isoconazole; Isepamicin; Isoniazid; Josamycin; Kanamycin Sulfate; Kitasamycin; Levofuraltadone; Levopropylcillin Potassium; Lexithromycin; Lincomycin; Lincomycin Hydrochloride; Lomefloxacin; Lomefloxacin Hydrochloride; Lomefloxacin Mesylate; Loracarbef; Mafenide; Meclocycline; Meclocycline Sulfosalicylate; Megalomicin Potassium Phosphate; Mequidox; Meropenem; Methacycline; Methacycline Hydrochloride; Methenamine; Methenamine Hippurate; Methenamine Mandelate; Methicillin Sodium; Metioprim; Metronidazole Hydrochloride; Metronidazole Phosphate; Mezlocillin; Mezlocillin Sodium; Minocycline; Minocycline Hydrochloride; Mirincamycin Hydrochloride; Monensin; Monensin Sodium; Nafcillin Sodium; Nalidixate Sodium; Nalidixic Acid; Natamycin; Nebramycin; Neomycin Palmitate; Neomycin Sulfate; Neomycin Undecylenate; Netilmicin Sulfate; Neutramycin; Nifuradene; Nifuraldezone; Nifuratel; Nifuratrone; Nifurdazil; Nifurimide; Nifurpirinol; Nifurquinazol; Nifurthiazole; Nitrocycline; Nitrofurantoin; Nitromide; Norfloxacin; Novobiocin Sodium; Ofloxacin; Ormetoprim; Oxacillin Sodium; Oximonam; Oximonam Sodium; Oxolinic Acid; Oxytetracycline; Oxytetracycline Calcium; Oxytetracycline Hydrochloride; Paldimycin; Parachlorophenol; Paulomycin; Pefloxacin; Pefloxacin Mesylate; Penamecillin; Penicillin G Benzathine; Penicillin G Potassium; Penicillin G Procaine; Penicillin G Sodium; Penicillin V; Penicillin V Benzathine; Penicillin V Hydrabamine; Penicillin V Potassium; Pentizidone Sodium; Phenyl Aminosalicylate; Piperacillin Sodium; Pirbenicillin Sodium; Piridicillin Sodium; Pirlimycin Hydrochloride; Pivampicillin Hydrochloride; Pivampicillin Pamoate; Pivampicillin Probenate; Polymyxin B Sulfate; Porfiromycin; Propikacin; Pyrazinamide; Pyrithione Zinc; Quindecamine Acetate; Quinupristin; Racephenicol; Ramoplanin; Ranimycin; Relomycin; Repromicin; Rifabutin; Rifametane; Rifamexil; Rifamide; Rifampin; Rifapentine; Rifaximin; Rolitetracycline; Rolitetracycline Nitrate; Rosaramicin; Rosaramicin Butyrate; Rosaramicin Propionate; Rosaramicin Sodium Phosphate; Rosaramicin Stearate; Rosoxacin; Roxarsone; Roxithromycin; Sancycline; Sanfetrinem Sodium; Sarmoxicillin; Sarpicillin; Scopafungin; Sisomicin; Sisomicin Sulfate; Sparfloxacin; Spectinomycin Hydrochloride; Spiramycin; Stallimycin Hydrochloride; Steffimycin; Streptomycin Sulfate; Streptonicozid; Sulfabenz; Sulfabenzamide; Sulfacetamide; Sulfacetamide Sodium; Sulfacytine; Sulfadiazine; Sulfadiazine Sodium; Sulfadoxine; Sulfalene; Sulfamerazine; Sulfameter; Sulfamethazine; Sulfamethizole; Sulfamethoxazole; Sulfamonomethoxine; Sulfamoxole; Sulfanilate Zinc; Sulfanitran; Sulfasalazine; Sulfasomizole; Sulfathiazole; Sulfazamet; Sulfisoxazole; Sulfisoxazole Acetyl; Sulfisoxazole Diolamine; Sulfomyxin; Sulopenem; Sultamicillin; Suncillin Sodium; Talampicillin Hydrochloride; Teicoplanin; Temafloxacin Hydrochloride; Temocillin; Tetracycline; Tetracycline Hydrochloride; Tetracycline Phosphate Complex; Tetroxoprim; Thiamphenicol; Thiphencillin Potassium; Ticarcillin Cresyl Sodium; Ticarcillin Disodium; Ticarcillin Monosodium; Ticlatone; Tiodonium Chloride; Tobramycin; Tobramycin Sulfate; Tosufloxacin; Trimethoprim; Trimethoprim Sulfate; Trisulfapyrimidines; Troleandomycin; Trospectomycin Sulfate; Tyrothricin; Vancomycin; Vancomycin Hydrochloride; Virginiamycin; and Zorbamycin.

[0242] In other embodiments, administration of a GDA is performed in combination with an anti-viral medicament or agent. Exemplary antiviral agents useful for the methods described herein include, but are not limited to, immunoglobulins, amantadine, interferon, nucleoside analogues, and protease inhibitors. Specific examples of antiviral agents include but are not limited to Acemannan; Acyclovir; Acyclovir Sodium; Adefovir; Alovudine; Alvircept Sudotox; Amantadine Hydrochloride; Aranotin; Arildone; Atevirdine Mesylate; Avridine; Cidofovir; Cipamfylline; Cytarabine Hydrochloride; Delavirdine Mesylate; Desciclovir; Didanosine; Disoxaril; Edoxudine; Enviradene; Enviroxime; Famciclovir; Famotine Hydrochloride; Fiacitabine; Fialuridine; Fosarilate; Foscamet Sodium; Fosfonet Sodium; Ganciclovir; Ganciclovir Sodium; Idoxuridine; Kethoxal; Lamivudine; Lobucavir; Memotine Hydrochloride; Methisazone; Nevirapine; Penciclovir; Pirodavir; Ribavirin; Rimantadine Hydrochloride; Saquinavir Mesylate; Somantadine Hydrochloride; Sorivudine; Statolon; Stavudine; Tilorone Hydrochloride; Trifluridine; Valacyclovir Hydrochloride; Vidarabine; Vidarabine Phosphate; Vidarabine Sodium Phosphate; Viroxime; Zalcitabine; Zidovudine; and Zinviroxime.

[0243] In other embodiments, administration of a GDA is performed in combination with an anti-fungal medicament or agent. An “antifungal medicament” is an agent that kills or inhibits the growth or function of infective fungi. Anti-fungal medicaments are sometimes classified by their mechanism of action. Some anti-fungal agents function as cell wall inhibitors by inhibiting glucose synthase, other antifungal agents function by destabilizing membrane integrity, and other antifungal agents function by breaking down chitin (e.g., chitinase) or immunosuppression (501 cream). Thus, exemplary antifungal medicaments useful for the methods described herein include, but are not limited to, imidazoles, 501 cream, and Acrisorcin, Ambruticin, Amorolfine, Amphotericin B, Azaconazole, Azaserine, Basifungin, BAY 38-9502, Bifonazole, Biphenamine Hydrochloride, Bispyrithione Magsulfex, Butenafine, Butoconazole Nitrate, Calcium Undecylenate, Candicidin, Carbol-Fuchsin, Chitinase, Chlordantoin, Ciclopirox, Ciclopirox Olamine, Cilofungin, Cisconazole, Clotrimazole, Cuprimyxin, Denofungin, Dipyrithione, Doconazole, Econazole, Econazole Nitrate, Enilconazole, Ethonam Nitrate, Fenticonazole Nitrate, Filipin, FK 463, Fluconazole, Flucytosine, Fungimycin, Griseofulvin, Hamycin, Isoconazole, Itraconazole, Kalafungin, Ketoconazole, Lomofungin, Lydimycin, Mepartricin, Miconazole, Miconazole Nitrate, MK 991, Monensin, Monensin Sodium, Naftifine Hydrochloride, Neomycin Undecylenate, Nifuratel, Nifurmerone, Nitralamine Hydrochloride, Nystatin, Octanoic Acid, Orconazole Nitrate, Oxiconazole Nitrate, Oxifungin Hydrochloride, Parconazole Hydrochloride, Partricin, Potassium Iodide, Pradimicin, Proclonol, Pyrithione Zinc, Pyrrolnitrin, Rutamycin, Sanguinarium Chloride, Saperconazole, Scopafungin, Selenium Sulfide, Sertaconazole, Sinefungin, Sulconazole Nitrate, Terbinafine, Terconazole, Thiram, Ticlatone, Tioconazole, Tolciclate, Tolindate, Tolnaftate, Triacetin, Triafungin, UK 292, Undecylenic Acid, Viridofulvin, Voriconazole, Zinc Undecylenate, and Zinoconazole Hydrochloride.

[0244] In further embodiments, administration of a GDA is performed with an anti-parasitic medicament or agent. An “antiparasitic medicament” refers to an agent that kills or inhibits the growth or function of infective parasites. Examples of antiparasitic medicaments, also referred to as parasiticides, useful for the methods described herein include, but are not limited to, albendazole, amphotericin B, benznidazole, bithionol, chloroquine HCl, chloroquine phosphate, clindamycin, dehydroemetine, diethylcarbamazine, diloxanide furoate, doxycycline, eflomithine, furazolidaone, glucocorticoids, halofantrine, iodoquinol, ivermectin, mebendazole, mefloquine, meglumine antimoniate, melarsoprol, metrifonate, metronidazole, niclosamide, nifurtimox, oxamniquine, paromomycin, pentamidine isethionate, piperazine, praziquantel, primaquine phosphate, proguanil, pyrantel pamoate, pyrimethanmine-sulfonamides, pyrimethanmine-sulfadoxine, quinacrine HCl, quinine sulfate, quinidine gluconate, spiramycin, stibogluconate sodium (sodium antimony gluconate), suramin, tetracycline, thiabendazole, timidazole, trimethroprim-sulfamethoxazole, and tryparsamide, some of which are used alone or in combination with others.

[0245] A GDA and an additional therapeutic agent may be administered in combination in the same composition, e.g., parenterally, or the additional therapeutic agent may be administered as part of a separate composition or by another method described herein.

### Veterinary Applications

[0246] It is contemplated that the compositions and methods of the invention will find utility in the area of veterinary care including the care and treatment of non-human vertebrates. As described herein, the term “non-human vertebrate” includes all vertebrates with the exception of Homo sapiens, including wild and domesticated species such as companion animals and livestock. Non-human vertebrates include mammals, such as alpaca, banteng, bison, camel, cat, cattle, deer, dog, donkey, gayal, goat, guinea pig, horse, llama, mule, pig, rabbit, reindeer, sheep water buffalo, and yak. Livestock includes domesticated animals raised in an agricultural setting to produce materials such as food, labor, and derived products such as fiber and chemicals. Generally, livestock includes all mammals, avians and fish having potential agricultural significance. In particular, four-legged slaughter animals include steers, heifers, cows, calves, bulls, cattle, swine and sheep.

### Bioprocessing

[0247] In one embodiment of the invention are methods for producing a biological product in a host cell by contacting the cell with a GDA (such as an antibody or fusion protein) capable of modulating expression of a target gene, or altering the levels of growth factor signaling molecules wherein such modulation or alteration enhances production of the biological product. According to the present invention, bioprocessing methods may be improved by using one or more of the GDAs of the present invention. They may also be improved by supplementing, replacing or adding one or more GDAs.

### IV. PHARMACEUTICAL COMPOSITIONS

[0248] The pharmaceutical compositions described herein can be characterized by one or more of bioavailability, therapeutic window and/or volume of distribution.

### Bioavailability

[0249] In one embodiment, the pharmaceutical composition consists of a GDA complex with a GPC. In such an embodiment, the GDA:GPC complex may be implanted at a desired therapeutic site where steady dissociation of the GPC and the growth factor from the GDA may occur over a desired period of time. In another embodiment, implantation of a GDA:GPC complex may be in association with a sponge or bone-like matrix. Such implantation sites may include, but are not limited to dental implant sites and sites of bone repair.

[0250] In another embodiment, the GPC is made in furin-deficient cells. Such underprocessed GPCs may be useful for treatment in areas where release is slowed due to the fact that furin cleavage in vivo is rate-limiting during GPC processing. In a further embodiment, one or both of the tolloid or furin sites in the GPC are mutated, to slow action of endogenous tolloid and/or furin proteases, resulting in even slower release at the site of implantation.

[0251] GDAs, when formulated into a composition with a delivery/formulation agent or vehicle as described herein, can exhibit an increase in bioavailability as compared to a composition lacking a delivery agent as described herein. As used herein, the term “bioavailability” refers to the systemic availability of a given amount of GDAs administered to a mammal. Bioavailability can be assessed by measuring the area under the curve (AUC) or the maximum serum or plasma concentration (Cₘₐₓ) of the unchanged form of a compound following administration of the compound to a mammal. AUC is a determination of the area under the curve plotting the serum or plasma concentration of a compound along the ordinate (Y-axis) against time along the abscissa (X-axis). Generally, the AUC for a particular compound can be calculated using methods known to those of ordinary skill in the art and as described in G. S. Banker, Modern Pharmaceutics, Drugs and the Pharmaceutical Sciences, v. 72, Marcel Dekker, New York, Inc., 1996, herein incorporated by reference.

[0252] The Cₘₐₓ value is the maximum concentration of the compound achieved in the serum or plasma of a mammal following administration of the compound to the mammal. The Cₘₐₓ value of a particular compound can be measured using methods known to those of ordinary skill in the art. The phrases “increasing bioavailability” or “improving the pharmacokinetics,” as used herein mean that the systemic availability of a GDA, measured as AUC, Cₘₐₓ, or Cₘᵢₙ in a mammal is greater, when co-administered with a delivery agent as described herein, than when such co-administration does not take place. In some embodiments, the bioavailability of the GDA can increase by at least about 2%, at least about 5%, at least about 10%, at least about 15%, at least about 20%, at least about 25%, at least about 30%, at least about 35%, at least about 40%, at least about 45%, at least about 50%, at least about 55%, at least about 60%, at least about 65%, at least about 70%, at least about 75%, at least about 80%, at least about 85%, at least about 90%, at least about 95%, or about 100%.

### Therapeutic Window

[0253] GDAs, when formulated into a composition with a delivery agent as described herein, can exhibit an increase in the therapeutic window of the administered GDA composition as compared to the therapeutic window of the administered GDA composition lacking a delivery agent as described herein. As used herein “therapeutic window” refers to the range of plasma concentrations, or the range of levels of therapeutically active substance at the site of action, with a high probability of eliciting a therapeutic effect. In some embodiments, the therapeutic window of the GDA when co-administered with a delivery agent as described herein can increase by at least about 2%, at least about 5%, at least about 10%, at least about 15%, at least about 20%, at least about 25%, at least about 30%, at least about 35%, at least about 40%, at least about 45%, at least about 50%, at least about 55%, at least about 60%, at least about 65%, at least about 70%, at least about 75%, at least about 80%, at least about 85%, at least about 90%, at least about 95%, or about 100%.

### Volume of Distribution

[0254] GDAs, when formulated into a composition with a delivery agent as described herein, can exhibit an improved volume of distribution (V_{dist}), e.g., reduced or targeted, relative to a composition lacking a delivery agent as described herein. The volume of distribution (V_{dist}) relates the amount of the drug in the body to the concentration of the drug in the blood or plasma. As used herein, the term “volume of distribution” refers to the fluid volume that would be required to contain the total amount of the drug in the body at the same concentration as in the blood or plasma: V_{dist} equals the amount of drug in the body/concentration of drug in blood or plasma. For example, for a 10 mg dose and a plasma concentration of 10 mg/L, the volume of distribution would be 1 liter. The volume of distribution reflects the extent to which the drug is present in the extravascular tissue. A large volume of distribution reflects the tendency of a compound to bind to the tissue components compared with plasma protein binding. In a clinical setting, V_{dist} can be used to determine a loading dose to achieve a steady state concentration. In some embodiments, the volume of distribution of the GDA when co-administered with a delivery agent as described herein can decrease at least about 2%, at least about 5%, at least about 10%, at least about 15%, at least about 20%, at least about 25%, at least about 30%, at least about 35%, at least about 40%, at least about 45%, at least about 50%, at least about 55%, at least about 60%, at least about 65%, at least about 70%.

### Formulation, Administration, Delivery and Dosing

[0255] In some embodiments, GDAs comprise compositions and/or complexes in combination with one or more pharmaceutically acceptable excipients. Pharmaceutical compositions may optionally comprise one or more additional active substances, e.g. therapeutically and/or prophylactically active substances. General considerations in the formulation and/or manufacture of pharmaceutical agents may be found, for example, in Remington: The Science and Practice of Pharmacy 21^{st} ed., Lippincott Williams & Wilkins, 2005 (incorporated herein by reference).

[0256] In some embodiments, compositions are administered to humans, human patients or subjects. For the purposes of the present disclosure, the phrase “active ingredient” generally refers to GDAs to be delivered as described herein.

[0257] Although the descriptions of pharmaceutical compositions provided herein are principally directed to pharmaceutical compositions which are suitable for administration to humans, it will be understood by the skilled artisan that such compositions are generally suitable for administration to any other animal, e.g., to non-human animals, e.g. non-human mammals. Modification of pharmaceutical compositions suitable for administration to humans in order to render the compositions suitable for administration to various animals is well understood, and the ordinarily skilled veterinary pharmacologist can design and/or perform such modification with merely ordinary, if any, experimentation. Subjects to which administration of the pharmaceutical compositions is contemplated include, but are not limited to, humans and/or other primates; mammals, including commercially relevant mammals such as cattle, pigs, horses, sheep, cats, dogs, mice, and/or rats; and/or birds, including commercially relevant birds such as poultry, chickens, ducks, geese, and/or turkeys.

[0258] Formulations of the pharmaceutical compositions described herein may be prepared by any method known or hereafter developed in the art of pharmacology. In general, such preparatory methods include the step of bringing the active ingredient into association with an excipient and/or one or more other accessory ingredients, and then, if necessary and/or desirable, dividing, shaping and/or packaging the product into a desired single- or multi-dose unit.

[0259] A pharmaceutical composition in accordance with the invention may be prepared, packaged, and/or sold in bulk, as a single unit dose, and/or as a plurality of single unit doses. As used herein, a “unit dose” is discrete amount of the pharmaceutical composition comprising a predetermined amount of the active ingredient. The amount of the active ingredient is generally equal to the dosage of the active ingredient which would be administered to a subject and/or a convenient fraction of such a dosage such as, for example, one-half or one-third of such a dosage.

[0260] Relative amounts of the active ingredient, the pharmaceutically acceptable excipient, and/or any additional ingredients in a pharmaceutical composition in accordance with the invention will vary, depending upon the identity, size, and/or condition of the subject treated and further depending upon the route by which the composition is to be administered. By way of example, the composition may comprise between 0.1% and 100%, e.g., between 0.5 and 50%, between 1-30%, between 5-80%, or at least 80% (w/w) active ingredient. In one embodiment, active ingredients are antibodies directed toward regulatory elements and/or GPCs.

### Formulations

[0261] GDAs of the invention can be formulated using one or more excipients to: (1) increase stability; (2) increase cell permeability; (3) permit the sustained or delayed release (e.g., from a formulation of the GDA); and/or (4) alter the biodistribution (e.g., target the GDA to specific tissues or cell types). In addition to traditional excipients such as any and all solvents, dispersion media, diluents, or other liquid vehicles, dispersion or suspension aids, surface active agents, isotonic agents, thickening or emulsifying agents, preservatives, formulations of the present invention can include, without limitation, liposomes, lipid nanoparticles, polymers, lipoplexes, core-shell nanoparticles, peptides, proteins, cells transfected with the GDAs (e.g., for transplantation into a subject) and combinations thereof.

### Excipients

[0262] Various excipients for formulating pharmaceutical compositions and techniques for preparing the composition are known in the art (see Remington: The Science and Practice of Pharmacy, 21^{st} Edition, A. R. Gennaro, Lippincott, Williams & Wilkins, Baltimore, Md., 2006; incorporated herein by reference).

[0263] The use of a conventional excipient medium is contemplated within the scope of the present disclosure, except insofar as any conventional excipient medium may be incompatible with a substance or its derivatives, such as by producing any undesirable biological effect or otherwise interacting in a deleterious manner with any other component(s) of the pharmaceutical composition.

[0264] Formulations of the pharmaceutical compositions described herein may be prepared by any method known or hereafter developed in the art of pharmacology. In general, such preparatory methods include the step of associating the active ingredient with an excipient and/or one or more other accessory ingredients.

[0265] A pharmaceutical composition in accordance with the present disclosure may be prepared, packaged, and/or sold in bulk, as a single unit dose, and/or as a plurality of single unit doses.

[0266] Relative amounts of the active ingredient, the pharmaceutically acceptable excipient, and/or any additional ingredients in a pharmaceutical composition in accordance with the present disclosure may vary, depending upon the identity, size, and/or condition of the subject being treated and further depending upon the route by which the composition is to be administered.

[0267] In some embodiments, a pharmaceutically acceptable excipient is at least 95%, at least 96%, at least 97%, at least 98%, at least 99%, or 100% pure. In some embodiments, an excipient is approved for use in humans and for veterinary use. In some embodiments, an excipient is approved by United States Food and Drug Administration. In some embodiments, an excipient is pharmaceutical grade. In some embodiments, an excipient meets the standards of the United States Pharmacopoeia (USP), the European Pharmacopoeia (EP), the British Pharmacopoeia, and/or the International Pharmacopoeia.

[0268] Pharmaceutically acceptable excipients used in the manufacture of pharmaceutical compositions include, but are not limited to, inert diluents, dispersing and/or granulating agents, surface active agents and/or emulsifiers, disintegrating agents, binding agents, preservatives, buffering agents, lubricating agents, and/or oils. Such excipients may optionally be included in pharmaceutical compositions.

[0269] Exemplary diluents include, but are not limited to, calcium carbonate, sodium carbonate, calcium phosphate, dicalcium phosphate, calcium sulfate, calcium hydrogen phosphate, sodium phosphate lactose, sucrose, cellulose, microcrystalline cellulose, kaolin, mannitol, sorbitol, inositol, sodium chloride, dry starch, cornstarch, powdered sugar, etc., and/or combinations thereof.

[0270] Exemplary granulating and/or dispersing agents include, but are not limited to, potato starch, corn starch, tapioca starch, sodium starch glycolate, clays, alginic acid, guar gum, citrus pulp, agar, bentonite, cellulose and wood products, natural sponge, cation-exchange resins, calcium carbonate, silicates, sodium carbonate, cross-linked poly(vinyl-pyrrolidone) (crospovidone), sodium carboxymethyl starch (sodium starch glycolate), carboxymethyl cellulose, cross-linked sodium carboxymethyl cellulose (croscarmellose), methylcellulose, pregelatinized starch (starch 1500), microcrystalline starch, water insoluble starch, calcium carboxymethyl cellulose, magnesium aluminum silicate (VEEGUM®), sodium lauryl sulfate, quaternary ammonium compounds, etc., and/or combinations thereof.

[0271] Exemplary surface active agents and/or emulsifiers include, but are not limited to, natural emulsifiers (e.g. acacia, agar, alginic acid, sodium alginate, tragacanth, chondrux, cholesterol, xanthan, pectin, gelatin, egg yolk, casein, wool fat, cholesterol, wax, and lecithin), colloidal clays (e.g. bentonite [aluminum silicate] and VEEGUM® [magnesium aluminum silicate]), long chain amino acid derivatives, high molecular weight alcohols (e.g. stearyl alcohol, cetyl alcohol, oleyl alcohol, triacetin monostearate, ethylene glycol distearate, glyceryl monostearate, and propylene glycol monostearate, polyvinyl alcohol), carbomers (e.g. carboxy polymethylene, polyacrylic acid, acrylic acid polymer, and carboxyvinyl polymer), carrageenan, cellulosic derivatives (e.g. carboxymethylcellulose sodium, powdered cellulose, hydroxymethyl cellulose, hydroxypropyl cellulose, hydroxypropyl methylcellulose, methylcellulose), sorbitan fatty acid esters (e.g. polyoxyethylene sorbitan monolaurate [TWEEN®20], polyoxyethylene sorbitan [TWEENn®60], polyoxyethylene sorbitan monooleate [TWEEN®80], sorbitan monopalmitate [SPAN®40], sorbitan monostearate [Span®60], sorbitan tristearate [Span® 65], glyceryl monooleate, sorbitan monooleate [SPAN®80]), polyoxyethylene esters (e.g. polyoxyethylene monostearate [MYRJ®45], polyoxyethylene hydrogenated castor oil, polyethoxylated castor oil, polyoxymethylene stearate, and SOLUTOL®), sucrose fatty acid esters, polyethylene glycol fatty acid esters (e.g. CREMOPHOR®), polyoxyethylene ethers, (e.g. polyoxyethylene lauryl ether [BRIJ® 30]), poly(vinyl-pyrrolidone), diethylene glycol monolaurate, triethanolamine oleate, sodium oleate, potassium oleate, ethyl oleate, oleic acid, ethyl laurate, sodium lauryl sulfate, PLUORINC®F 68, POLOXAMER 188, cetrimonium bromide, cetylpyridinium chloride, benzalkonium chloride, docusate sodium, etc. and/or combinations thereof.

[0272] Exemplary binding agents include, but are not limited to, starch (e.g. cornstarch and starch paste); gelatin; sugars (e.g. sucrose, glucose, dextrose, dextrin, molasses, lactose, lactitol, mannitol,); natural and synthetic gums (e.g. acacia, sodium alginate, extract of Irish moss, panwar gum, ghatti gum, mucilage of isapol husks, carboxymethylcellulose, methylcellulose, ethylcellulose, hydroxyethylcellulose, hydroxypropyl cellulose, hydroxypropyl methylcellulose, microcrystalline cellulose, cellulose acetate, poly(vinyl-pyrrolidone), magnesium aluminum silicate (Veegum®), and larch arabogalactan); alginates; polyethylene oxide; polyethylene glycol; inorganic calcium salts; silicic acid; polymethacrylates; waxes; water; alcohol; etc.; and combinations thereof.

[0273] Exemplary preservatives may include, but are not limited to, antioxidants, chelating agents, antimicrobial preservatives, antifungal preservatives, alcohol preservatives, acidic preservatives, and/or other preservatives. Exemplary antioxidants include, but are not limited to, alpha tocopherol, ascorbic acid, acorbyl palmitate, butylated hydroxyanisole, butylated hydroxytoluene, monothioglycerol, potassium metabisulfite, propionic acid, propyl gallate, sodium ascorbate, sodium bisulfite, sodium metabisulfite, and/or sodium sulfite. Exemplary chelating agents include ethylenediaminetetraacetic acid (EDTA), citric acid monohydrate, disodium edetate, dipotassium edetate, edetic acid, fumaric acid, malic acid, phosphoric acid, sodium edetate, tartaric acid, and/or trisodium edetate. Exemplary antimicrobial preservatives include, but are not limited to, benzalkonium chloride, benzethonium chloride, benzyl alcohol, bronopol, cetrimide, cetylpyridinium chloride, chlorhexidine, chlorobutanol, chlorocresol, chloroxylenol, cresol, ethyl alcohol, glycerin, hexetidine, imidurea, phenol, phenoxyethanol, phenylethyl alcohol, phenylmercuric nitrate, propylene glycol, and/or thimerosal. Exemplary antifungal preservatives include, but are not limited to, butyl paraben, methyl paraben, ethyl paraben, propyl paraben, benzoic acid, hydroxybenzoic acid, potassium benzoate, potassium sorbate, sodium benzoate, sodium propionate, and/or sorbic acid. Exemplary alcohol preservatives include, but are not limited to, ethanol, polyethylene glycol, phenol, phenolic compounds, bisphenol, chlorobutanol, hydroxybenzoate, and/or phenylethyl alcohol. Exemplary acidic preservatives include, but are not limited to, vitamin A, vitamin C, vitamin E, beta-carotene, citric acid, acetic acid, dehydroacetic acid, ascorbic acid, sorbic acid, and/or phytic acid. Other preservatives include, but are not limited to, tocopherol, tocopherol acetate, deteroxime mesylate, cetrimide, butylated hydroxyanisol (BHA), butylated hydroxytoluened (BHT), ethylenediamine, sodium lauryl sulfate (SLS), sodium lauryl ether sulfate (SLES), sodium bisulfite, sodium metabisulfite, potassium sulfite, potassium metabisulfite, GLYDANT PLUS®, PHENONIP®, methylparaben, GERMALL 115, GERMABEN®II, NEOLONE™, KATHON™, and/or EUXYL®.

[0274] Exemplary buffering agents include, but are not limited to, citrate buffer solutions, acetate buffer solutions, phosphate buffer solutions, ammonium chloride, calcium carbonate, calcium chloride, calcium citrate, calcium glubionate, calcium gluceptate, calcium gluconate, D-gluconic acid, calcium glycerophosphate, calcium lactate, propanoic acid, calcium levulinate, pentanoic acid, dibasic calcium phosphate, phosphoric acid, tribasic calcium phosphate, calcium hydroxide phosphate, potassium acetate, potassium chloride, potassium gluconate, potassium mixtures, dibasic potassium phosphate, monobasic potassium phosphate, potassium phosphate mixtures, sodium acetate, sodium bicarbonate, sodium chloride, sodium citrate, sodium lactate, dibasic sodium phosphate, monobasic sodium phosphate, sodium phosphate mixtures, tromethamine, magnesium hydroxide, aluminum hydroxide, alginic acid, pyrogen-free water, isotonic saline, Ringer's solution, ethyl alcohol, etc., and/or combinations thereof.

[0275] Exemplary lubricating agents include, but are not limited to, magnesium stearate, calcium stearate, stearic acid, silica, talc, malt, glyceryl behanate, hydrogenated vegetable oils, polyethylene glycol, sodium benzoate, sodium acetate, sodium chloride, leucine, magnesium lauryl sulfate, sodium lauryl sulfate, etc., and combinations thereof.

[0276] Exemplary oils include, but are not limited to, almond, apricot kernel, avocado, babassu, bergamot, black current seed, borage, cade, camomile, canola, caraway, carnauba, castor, cinnamon, cocoa butter, coconut, cod liver, coffee, corn, cotton seed, emu, eucalyptus, evening primrose, fish, flaxseed, geraniol, gourd, grape seed, hazel nut, hyssop, isopropyl myristate, jojoba, kukui nut, lavandin, lavender, lemon, litsea cubeba, macademia nut, mallow, mango seed, meadowfoam seed, mink, nutmeg, olive, orange, orange roughy, palm, palm kernel, peach kernel, peanut, poppy seed, pumpkin seed, rapeseed, rice bran, rosemary, safflower, sandalwood, sasquana, savoury, sea buckthorn, sesame, shea butter, silicone, soybean, sunflower, tea tree, thistle, tsubaki, vetiver, walnut, and wheat germ oils. Exemplary oils include, but are not limited to, butyl stearate, caprylic triglyceride, capric triglyceride, cyclomethicone, diethyl sebacate, dimethicone 360, isopropyl myristate, mineral oil, octyldodecanol, oleyl alcohol, silicone oil, and/or combinations thereof.

[0277] Excipients such as cocoa butter and suppository waxes, coloring agents, coating agents, sweetening, flavoring, and/or perfuming agents can be present in the composition, according to the judgment of the formulator.

### Formulation Vehicles: Liposomes, Lipoplexes, and Lipid Nanoparticles

[0278] GDAs of the invention can be formulated using one or more liposomes, lipoplexes, or lipid nanoparticles. In one embodiment, pharmaceutical compositions of GDA include liposomes. Liposomes are artificially-prepared vesicles which may primarily be composed of a lipid bilayer and may be used as a delivery vehicle for the administration of nutrients and pharmaceutical formulations. Liposomes can be of different sizes such as, but not limited to, a multilamellar vesicle (MLV) which may be hundreds of nanometers in diameter and may contain a series of concentric bilayers separated by narrow aqueous compartments, a small unicellular vesicle (SUV) which may be smaller than 50 nm in diameter, and a large unilamellar vesicle (LUV) which may be between 50 and 500 nm in diameter. Liposome design may include, but is not limited to, opsonins or ligands in order to improve the attachment of liposomes to unhealthy tissue or to activate events such as, but not limited to, endocytosis. Liposomes may contain a low or a high pH in order to improve the delivery of the pharmaceutical formulations.

[0279] The formation of liposomes may depend on the physicochemical characteristics such as, but not limited to, the pharmaceutical formulation entrapped and the liposomal ingredients, the nature of the medium in which the lipid vesicles are dispersed, the effective concentration of the entrapped substance and its potential toxicity, any additional processes involved during the application and/or delivery of the vesicles, the optimization size, polydispersity and the shelf-life of the vesicles for the intended application, and the batch-to-batch reproducibility and possibility of large-scale production of safe and efficient liposomal products.

[0280] In one embodiment such formulations may also be constructed or compositions altered such that they passively or actively are directed to different cell types in vivo.

[0281] Formulations can also be selectively targeted through expression of different ligands on their surface as exemplified by, but not limited by, folate, transferrin, N-acetylgalactosamine (GalNAc), and antibody targeted approaches.

[0282] Liposomes, lipoplexes, or lipid nanoparticles may be used to improve the efficacy of GDA function as these formulations may be able to increase cell transfection by the GDA. The liposomes, lipoplexes, or lipid nanoparticles may also be used to increase the stability of the GDA.

[0283] Liposomes that are specifically formulated for antibody cargo are prepared according to techniques known in the art, such as described by Eppstein et al. (Eppstein, D. A. et al., Biological activity of liposome-encapsulated murine interferon gamma is mediated by a cell membrane receptor. Proc Natl Acad Sci USA. 1985 June; 82(11):3688-92); Hwang et al. (Hwang, K. J. et al., Hepatic uptake and degradation of unilamellar sphingomyelin/cholesterol liposomes: a kinetic study. Proc Natl Acad Sci USA. 1980 July; 77(7):4030-4); U.S. Pat. No. 4,485,045 and U.S. Pat. No. 4,544,545. Production of liposomes with sustained circulation time are also described in U.S. Pat. No. 5,013,556.

[0284] Antibody containing liposomes of the present invention may be generated using reverse phase evaporation utilizing lipids such as phosphatidylcholine, cholesterol as well as phosphatidylethanolamine that has been polyethylene glycol-derivatized. Filters with defined pore size are used to extrude liposomes of the desired diameter. In another embodiment, GDAs of the present invention can be conjugated to the external surface of liposomes by disulfide interchange reaction as is described by Martin et al. (Martin, F. J. et al., Irreversible coupling of immunoglobulin fragments to preformed vesicles. An improved method for liposome targeting. J Biol Chem. 1982 Jan. 10; 257(1):286-8).

### Formulation Vehicles: Polymers and Nanoparticles

[0285] The GDA of the invention can be formulated using natural and/or synthetic polymers. Non-limiting examples of polymers which may be used for delivery include, but are not limited to DMRI/DOPE, poloxamer, chitosan, cyclodextrin, and poly(lactic-co-glycolic acid) (PLGA) polymers. These may be biodegradable.

[0286] The polymer formulation can permit the sustained or delayed release of GDA (e.g., following intramuscular or subcutaneous injection). The altered release profile for the GDA can result in, for example, release of the GDA over an extended period of time. The polymer formulation may also be used to increase the stability of the GDA.

[0287] Polymer formulations can also be selectively targeted through expression of different ligands as exemplified by, but not limited by, folate, transferrin, and N-acetylgalactosamine (GalNAc) (Benoit et al., Biomacromolecules. 2011 12:2708-2714; Rozema et al., Proc Natl Acad Sci USA. 2007 104:12982-12887; Davis, Mol Pharm. 2009 6:659-668; Davis, Nature 2010 464:1067-1070; herein incorporated by reference in its entirety).

[0288] The GDA of the invention can also be formulated as a nanoparticle using a combination of polymers, lipids, and/or other biodegradable agents, such as, but not limited to, calcium phosphate. Components may be combined in a core-shell, hybrid, and/or layer-by-layer architecture, to allow for fine-tuning of the nanoparticle so delivery of the GDA may be enhanced. For GDA antibodies, systems based on poly(2-(methacryloyloxy)ethyl phosphorylcholine)-block-(2-(diisopropylamino)ethyl methacrylate), (PMPC-PDPA), a pH sensitive diblock copolymer that self-assembles to form nanometer-sized vesicles, also known as polymersomes, at physiological pH may be used. These polymersomes have been shown to successfully deliver relatively high antibody payloads within live cells. (Massignani, et al, Cellular delivery of antibodies: effective targeted subcellular imaging and new therapeutic tool. Nature Proceedings, May, 2010.)

[0289] In one embodiment, a PEG-charge-conversional polymer (Pitella et al., Biomaterials. 2011 32:3106-3114) may be used to form a nanoparticle to deliver the GDA of the present invention. The PEG-charge-conversional polymer may improve upon the PEG-polyanion block copolymers by being cleaved into a polycation at acidic pH, thus enhancing endosomal escape.

[0290] The use of core-shell nanoparticles has additionally focused on a high-throughput approach to synthesize cationic cross-linked nanogel cores and various shells (Siegwart et al., Proc Natl Acad Sci USA. 2011 108:12996-13001). The complexation, delivery, and internalization of the polymeric nanoparticles can be precisely controlled by altering the chemical composition in both the core and shell components of the nanoparticle.

[0291] In one embodiment, matrices of poly(ethylene-co-vinyl acetate), are used to deliver the GDAs of the invention. Such matrices are described in Nature Biotechnology 10, 1446-1449 (1992).

### Antibody Formulations

[0292] Antibody GDAs of the invention may be formulated for intravenous administration or extravascular administration (Daugherty, et al., Formulation and delivery issues for monoclonal antibody therapeutics. Adv Drug Deliv Rev. 2006 Aug. 7; 58(5-6):686-706, US patent publication number 2011/0135570, all of which are incorporated herein in their entirety). Extravascular administration routes may include, but are not limited to subcutaneous administration, intraperitoneal administration, intracerebral administration, intraocular administration, intralesional administration, topical administration and intramuscular administration.

[0293] Antibody structures may be modified to improve their effectiveness as therapeutics. Improvements may include, but are not limited to improved thermodynamic stability, reduced Fc receptor binding properties and improved folding efficiency. Modifications may include, but are not limited to amino acid substitutions, glycosylation, palmitoylation and protein conjugation.

[0294] Antibody GDAs may be formulated with antioxidants to reduce antibody oxidation. Antibody GDAs may also be formulated with additives to reduce protein aggregation. Such additives may include, but are not limited to albumin, amino acids, sugars, urea, guanidinium chloride, polyalchohols, polymers (such as polyethylene glycol and dextrans), surfactants (including, but not limited to polysorbate 20 and polysorbate 80) or even other antibodies.

[0295] Antibody GDAs of the present invention may be formulated to reduce the impact of water on antibody structure and function. Antibody preparations in such formulations may be may be lyophilized. Formulations subject to lyophilization may include carbohydrates or polyol compounds to protect and stabilize antibody structure. Such compounds include, but are not limited to sucrose, trehalose and mannitol.

[0296] Antibody GDAs of the present invention may be formulated with polymers. In one embodiment, polymer formulations may contain hydrophobic polymers. Such polymers may be microspheres formulated with polylactide-co-glycolide through a solid-in-oil-in-water encapsulation method. Microspheres comprising ethylene-vinyl acetate copolymer are also contemplated for antibody delivery and may be used to extend the time course of antibody release at the site of delivery. In another embodiment, polymers may be aqueous gels. Such gels may, for example, comprise carboxymethylcellulose. Aqueous gels may also comprise hyaluronic acid hydrogel. Antibodies may be covalently linked to such gels through a hydrazone linkage that allows for sustained delivery in tissues, including but not limited to the tissues of the central nervous system.

### Formulation Vehicles: Peptides and Proteins

[0297] The GDA of the invention can be formulated with peptides and/or proteins. In one embodiment, peptides such as, but not limited to, cell penetrating peptides and proteins and peptides that enable intracellular delivery may be used to deliver pharmaceutical formulations. A non-limiting example of a cell penetrating peptide which may be used with the pharmaceutical formulations of the present invention includes a cell-penetrating peptide sequence attached to polycations that facilitates delivery to the intracellular space, e.g., HIV-derived TAT peptide, penetratins, transportans, or hCT derived cell-penetrating peptides (see, e.g., Caron et al., Mol. Ther. 3(3):310-8 (2001); Langel, Cell-Penetrating Peptides: Processes and Applications (CRC Press, Boca Raton Fla., 2002); El-Andaloussi et al., Curr. Pharm. Des. 11(28):3597-611 (2003); and Deshayes et al., Cell. Mol. Life Sci. 62(16):1839-49 (2005), all of which are incorporated herein by reference). The compositions can also be formulated to include a cell penetrating agent, e.g., liposomes, which enhance delivery of the compositions to the intracellular space. GDAs of the invention may be complexed to peptides and/or proteins such as, but not limited to, peptides and/or proteins from Aileron Therapeutics (Cambridge, Mass.) and Permeon Biologics (Cambridge, Mass.) in order to enable intracellular delivery (Cronican et al., ACS Chem. Biol. 2010 5:747-752; McNaughton et al., Proc. Natl. Acad. Sci. USA 2009 106:6111-6116; Sawyer, Chem Biol Drug Des. 2009 73:3-6; Verdine and Hilinski, Methods Enzymol. 2012; 503:3-33; all of which are herein incorporated by reference in their entirety).

[0298] In one embodiment, the cell-penetrating polypeptide may comprise a first domain and a second domain. The first domain may comprise a supercharged polypeptide. The second domain may comprise a protein-binding partner. As used herein, “protein-binding partner” includes, but are not limited to, antibodies and functional fragments thereof, scaffold proteins, or peptides. The cell-penetrating polypeptide may further comprise an intracellular binding partner for the protein-binding partner. The cell-penetrating polypeptide may be capable of being secreted from a cell where the GDA may be introduced.

[0299] Formulations of the including peptides or proteins may be used to increase cell transfection by the GDA or alter the biodistribution of the GDA (e.g., by targeting specific tissues or cell types).

### Formulation Vehicles: Cells

[0300] Cell-based formulations of the GDA compositions of the invention may be used to ensure cell transfection (e.g., in the cellular carrier) or alter the biodistribution of the compositions (e.g., by targeting the cell carrier to specific tissues or cell types).

### Cell Transfer Methods

[0301] A variety of methods are known in the art and suitable for introduction of nucleic acids or proteins into a cell, including viral and non-viral mediated techniques. Examples of typical non-viral mediated techniques include, but are not limited to, electroporation, calcium phosphate mediated transfer, nucleofection, sonoporation, heat shock, magnetofection, liposome mediated transfer, microinjection, microproj ectile mediated transfer (nanoparticles), cationic polymer mediated transfer (DEAE-dextran, polyethylenimine, polyethylene glycol (PEG) and the like) or cell fusion.

[0302] The technique of sonoporation, or cellular sonication, is the use of sound (e.g., ultrasonic frequencies) for modifying the permeability of the cell plasma membrane. Sonoporation methods are known to those in the art and are used to deliver nucleic acids in vivo (Yoon and Park, Expert Opin Drug Deliv. 2010 7:321-330; Postema and Gilja, Curr Pharm Biotechnol. 2007 8:355-361; Newman and Bettinger, Gene Ther. 2007 14:465-475; all herein incorporated by reference in their entirety). Sonoporation methods are known in the art and are also taught for example as it relates to bacteria in US Patent Publication 20100196983 and as it relates to other cell types in, for example, US Patent Publication 20100009424, each of which are incorporated herein by reference in their entirety.

[0303] Electroporation techniques are also well known in the art and are used to deliver nucleic acids in vivo and clinically (Andre et al., Curr Gene Ther. 2010 10:267-280; Chiarella et al., Curr Gene Ther. 2010 10:281-286; Hojman, Curr Gene Ther. 2010 10:128-138; all herein incorporated by reference in their entirety). In one embodiment, GDAs may be delivered by electroporation.

### Administration and Delivery

[0304] The compositions of the present invention may be administered by any of the standard methods or routes known in the art.

[0305] GDAs of the present invention may be administered by any route which results in a therapeutically effective outcome. These include, but are not limited to enteral, gastroenteral, epidural, oral, transdermal, epidural (peridural), intracerebral (into the cerebrum), intracerebroventricular (into the cerebral ventricles), epicutaneous (application onto the skin), intradermal, (into the skin itself), subcutaneous (under the skin), nasal administration (through the nose), intravenous (into a vein), intraarterial (into an artery), intramuscular (into a muscle), intracardiac (into the heart), intraosseous infusion (into the bone marrow), intrathecal (into the spinal canal), intraperitoneal, (infusion or injection into the peritoneum), intravesical infusion, intravitreal, (through the eye), intracavernous injection, (into the base of the penis), intravaginal administration, intrauterine, extra-amniotic administration, transdermal (diffusion through the intact skin for systemic distribution), transmucosal (diffusion through a mucous membrane), insufflation (snorting), sublingual, sublabial, enema, eye drops (onto the conjunctiva), or in ear drops. In specific embodiments, compositions may be administered in a way which allows them cross the blood-brain barrier, vascular barrier, or other epithelial barrier. Non-limiting routes of administration for the GDAs of the present invention are described below.

### Parenteral and Injectible Administration

[0306] Liquid dosage forms for oral and parenteral administration include, but are not limited to, pharmaceutically acceptable emulsions, microemulsions, solutions, suspensions, syrups, and/or elixirs. In addition to active ingredients, liquid dosage forms may comprise inert diluents commonly used in the art such as, for example, water or other solvents, solubilizing agents and emulsifiers such as ethyl alcohol, isopropyl alcohol, ethyl carbonate, ethyl acetate, benzyl alcohol, benzyl benzoate, propylene glycol, 1,3-butylene glycol, dimethylformamide, oils (in particular, cottonseed, groundnut, corn, germ, olive, castor, and sesame oils), glycerol, tetrahydrofurfuryl alcohol, polyethylene glycols and fatty acid esters of sorbitan, and mixtures thereof. Besides inert diluents, oral compositions can include adjuvants such as wetting agents, emulsifying and suspending agents, sweetening, flavoring, and/or perfuming agents. In certain embodiments for parenteral administration, compositions are mixed with solubilizing agents such as CREMOPHOR®, alcohols, oils, modified oils, glycols, polysorbates, cyclodextrins, polymers, and/or combinations thereof. In other embodiments, surfactants are included such as hydroxypropylcellulose.

[0307] Injectable preparations, for example, sterile injectable aqueous or oleaginous suspensions may be formulated according to the known art using suitable dispersing agents, wetting agents, and/or suspending agents. Sterile injectable preparations may be sterile injectable solutions, suspensions, and/or emulsions in nontoxic parenterally acceptable diluents and/or solvents, for example, as a solution in 1,3-butanediol. Among the acceptable vehicles and solvents that may be employed are water, Ringer's solution, U.S.P., and isotonic sodium chloride solution. Sterile, fixed oils are conventionally employed as a solvent or suspending medium. For this purpose any bland fixed oil can be employed including synthetic mono- or diglycerides. Fatty acids such as oleic acid can be used in the preparation of injectables.

[0308] Injectable formulations can be sterilized, for example, by filtration through a bacterial-retaining filter, and/or by incorporating sterilizing agents in the form of sterile solid compositions which can be dissolved or dispersed in sterile water or other sterile injectable medium prior to use.

[0309] In order to prolong the effect of an active ingredient, it is often desirable to slow the absorption of the active ingredient from subcutaneous or intramuscular injection. This may be accomplished by the use of a liquid suspension of crystalline or amorphous material with poor water solubility. The rate of absorption of the drug then depends upon its rate of dissolution which, in turn, may depend upon crystal size and crystalline form. Alternatively, delayed absorption of a parenterally administered drug form is accomplished by dissolving or suspending the drug in an oil vehicle. Injectable depot forms are made by forming microencapsule matrices of the drug in biodegradable polymers such as polylactide-polyglycolide. Depending upon the ratio of drug to polymer and the nature of the particular polymer employed, the rate of drug release can be controlled. Examples of other biodegradable polymers include poly(orthoesters) and poly(anhydrides). Depot injectable formulations are prepared by entrapping the drug in liposomes or microemulsions which are compatible with body tissues.

### Rectal and Vaginal Administration

[0310] Compositions for rectal or vaginal administration are typically suppositories which can be prepared by mixing compositions with suitable non-irritating excipients such as cocoa butter, polyethylene glycol or a suppository wax which are solid at ambient temperature but liquid at body temperature and therefore melt in the rectum or vaginal cavity and release the active ingredient.

### Oral Administration

[0311] Solid dosage forms for oral administration include capsules, tablets, pills, powders, and granules. In such solid dosage forms, an active ingredient is mixed with at least one inert, pharmaceutically acceptable excipient such as sodium citrate or dicalcium phosphate and/or fillers or extenders (e.g. starches, lactose, sucrose, glucose, mannitol, and silicic acid), binders (e.g. carboxymethylcellulose, alginates, gelatin, polyvinylpyrrolidinone, sucrose, and acacia), humectants (e.g. glycerol), disintegrating agents (e.g. agar, calcium carbonate, potato or tapioca starch, alginic acid, certain silicates, and sodium carbonate), solution retarding agents (e.g. paraffin), absorption accelerators (e.g. quaternary ammonium compounds), wetting agents (e.g. cetyl alcohol and glycerol monostearate), absorbents (e.g. kaolin and bentonite clay), and lubricants (e.g. talc, calcium stearate, magnesium stearate, solid polyethylene glycols, sodium lauryl sulfate), and mixtures thereof. In the case of capsules, tablets and pills, the dosage form may comprise buffering agents.

### Topical or Transdermal Administration

[0312] As described herein, compositions containing the GDAs of the invention may be formulated for administration topically. The skin may be an ideal target site for delivery as it is readily accessible. Gene expression may be restricted not only to the skin, potentially avoiding nonspecific toxicity, but also to specific layers and cell types within the skin.

[0313] The site of cutaneous expression of the delivered compositions will depend on the route of nucleic acid delivery. Three routes are commonly considered to deliver GDAs to the skin: (i) topical application (e.g. for local/regional treatment and/or cosmetic applications); (ii) intradermal injection (e.g. for local/regional treatment and/or cosmetic applications); and (iii) systemic delivery (e.g. for treatment of dermatologic diseases that affect both cutaneous and extracutaneous regions). GDAs can be delivered to the skin by several different approaches known in the art.

[0314] In one embodiment, the invention provides for a variety of dressings (e.g., wound dressings) or bandages (e.g., adhesive bandages) for conveniently and/or effectively carrying out methods of the present invention. Typically dressing or bandages may comprise sufficient amounts of pharmaceutical compositions and/or GDAs described herein to allow a user to perform multiple treatments of a subject(s).

[0315] In one embodiment, the invention provides for the GDAs compositions to be delivered in more than one injection.

[0316] Dosage forms for topical and/or transdermal administration of a composition may include ointments, pastes, creams, lotions, gels, powders, solutions, sprays, inhalants and/or patches. Generally, an active ingredient is admixed under sterile conditions with a pharmaceutically acceptable excipient and/or any needed preservatives and/or buffers as may be required. Additionally, the present invention contemplates the use of transdermal patches, which often have the added advantage of providing controlled delivery of a compound to the body. Such dosage forms may be prepared, for example, by dissolving and/or dispensing the compound in the proper medium. Alternatively or additionally, rate may be controlled by either providing a rate controlling membrane and/or by dispersing the compound in a polymer matrix and/or gel.

[0317] Formulations suitable for topical administration include, but are not limited to, liquid and/or semi liquid preparations such as liniments, lotions, oil in water and/or water in oil emulsions such as creams, ointments and/or pastes, and/or solutions and/or suspensions.

[0318] Topically-administrable formulations may, for example, comprise from about 1% to about 10% (w/w) active ingredient, although the concentration of active ingredient may be as high as the solubility limit of the active ingredient in the solvent. Formulations for topical administration may further comprise one or more of the additional ingredients described herein.

### Depot Administration

[0319] As described herein, in some embodiments, the composition is formulated in depots for extended release. Generally, a specific organ or tissue (a “target tissue”) is targeted for administration.

[0320] In some aspects of the invention, the GDAs are spatially retained within or proximal to a target tissue. Provided are method of providing a composition to a target tissue of a mammalian subject by contacting the target tissue (which contains one or more target cells) with the composition under conditions such that the composition, in particular the GDA component(s) of the composition, is substantially retained in the target tissue, meaning that at least 10, 20, 30, 40, 50, 60, 70, 80, 85, 90, 95, 96, 97, 98, 99, 99.9, 99.99 or greater than 99.99% of the composition is retained in the target tissue. Advantageously, retention is determined by measuring the amount of the GDA present in the composition that enters one or more target cells. For example, at least 1, 5, 10, 20, 30, 40, 50, 60, 70, 80, 85, 90, 95, 96, 97, 98, 99, 99.9, 99.99 or greater than 99.99% of the GDA administered to the subject are present intracellularly at a period of time following administration. For example, intramuscular injection to a mammalian subject is performed using an aqueous composition containing a GDA and a transfection reagent, and retention of the composition is determined by measuring the amount of the GDA present in the muscle cells.

[0321] Certain aspects of the invention are directed to methods of providing a composition to a target tissue of a mammalian subject, by contacting the target tissue (containing one or more target cells) with the composition under conditions such that the composition is substantially retained in the target tissue. The composition contains an effective amount of a GDA such that the effect of interest is produced in at least one target cell. The compositions generally contain a cell penetration agent, although “naked” GDAs (such as GDAs without a cell penetration agent or other agent) is also contemplated, and a pharmaceutically acceptable carrier.

[0322] In some circumstances, the amount of a growth factor present in cells in a tissue is desirably increased. Preferably, this increase in growth factor is spatially restricted to cells within the target tissue. Thus, provided are methods of increasing the amount of growth factor of interest in a tissue of a mammalian subject. A composition is provided that contains GDAs characterized in that a unit quantity of composition has been determined to produce the level of growth factor of interest in a substantial percentage of cells contained within a predetermined volume of the target tissue.

[0323] In some embodiments, the composition includes a plurality of different GDAs, where one or more than one of the GDAs targets a biomolecule of interest. Optionally, the composition also contains a cell penetration agent to assist in the intracellular delivery of the composition. A determination is made of the dose of the composition required to target the biomolecule of interest in a substantial percentage of cells contained within the predetermined volume of the target tissue (generally, without targeting a biomolecule of interest in tissue adjacent to the predetermined volume, or distally to the target tissue). Subsequent to this determination, the determined dose is introduced directly into the tissue of the mammalian subject.

[0324] In one embodiment, the invention provides for the GDAs to be delivered in more than one injection or by split dose injections.

### Pulmonary Administration

[0325] A pharmaceutical composition may be prepared, packaged, and/or sold in a formulation suitable for pulmonary administration via the buccal cavity. Such a formulation may comprise dry particles which comprise the active ingredient and which have a diameter in the range from about 0.5 nm to about 7 nm or from about 1 nm to about 6 nm. Such compositions are suitably in the form of dry powders for administration using a device comprising a dry powder reservoir to which a stream of propellant may be directed to disperse the powder and/or using a self propelling solvent/powder dispensing container such as a device comprising the active ingredient dissolved and/or suspended in a low-boiling propellant in a sealed container. Such powders comprise particles wherein at least 98% of the particles by weight have a diameter greater than 0.5 nm and at least 95% of the particles by number have a diameter less than 7 nm. Alternatively, at least 95% of the particles by weight have a diameter greater than 1 nm and at least 90% of the particles by number have a diameter less than 6 nm. Dry powder compositions may include a solid fine powder diluent such as sugar and are conveniently provided in a unit dose form.

[0326] Low boiling propellants generally include liquid propellants having a boiling point of below 65° F. at atmospheric pressure. Generally the propellant may constitute 50% to 99.9% (w/w) of the composition, and active ingredient may constitute 0.1% to 20% (w/w) of the composition. A propellant may further comprise additional ingredients such as a liquid non-ionic and/or solid anionic surfactant and/or a solid diluent (which may have a particle size of the same order as particles comprising the active ingredient).

[0327] Pharmaceutical compositions formulated for pulmonary delivery may provide an active ingredient in the form of droplets of a solution and/or suspension. Such formulations may be prepared, packaged, and/or sold as aqueous and/or dilute alcoholic solutions and/or suspensions, optionally sterile, comprising active ingredient, and may conveniently be administered using any nebulization and/or atomization device. Such formulations may further comprise one or more additional ingredients including, but not limited to, a flavoring agent such as saccharin sodium, a volatile oil, a buffering agent, a surface active agent, and/or a preservative such as methylhydroxybenzoate. Droplets provided by this route of administration may have an average diameter in the range from about 0.1 nm to about 200 nm.

### Intranasal, Nasal and Buccal Administration

[0328] Formulations described herein as being useful for pulmonary delivery are useful for intranasal delivery of a pharmaceutical composition. Another formulation suitable for intranasal administration is a coarse powder comprising the active ingredient and having an average particle from about 0.2 μm to 500 μm. Such a formulation is administered in the manner in which snuff is taken, i.e. by rapid inhalation through the nasal passage from a container of the powder held close to the nose.

[0329] Formulations suitable for nasal administration may, for example, comprise from about as little as 0.1% (w/w) and as much as 100% (w/w) of active ingredient, and may comprise one or more of the additional ingredients described herein. A pharmaceutical composition may be prepared, packaged, and/or sold in a formulation suitable for buccal administration. Such formulations may, for example, be in the form of tablets and/or lozenges made using conventional methods, and may, for example, 0.1% to 20% (w/w) active ingredient, the balance comprising an orally dissolvable and/or degradable composition and, optionally, one or more of the additional ingredients described herein. Alternately, formulations suitable for buccal administration may comprise a powder and/or an aerosolized and/or atomized solution and/or suspension comprising active ingredient. Such powdered, aerosolized, and/or aerosolized formulations, when dispersed, may have an average particle and/or droplet size in the range from about 0.1 nm to about 200 nm, and may further comprise one or more of any additional ingredients described herein.

### Ophthalmic or Otic Administration

[0330] A pharmaceutical composition may be prepared, packaged, and/or sold in a formulation suitable for ophthalmic or otic administration. Such formulations may, for example, be in the form of eye or ear drops including, for example, a 0.1/1.0% (w/w) solution and/or suspension of the active ingredient in an aqueous or oily liquid excipient. Such drops may further comprise buffering agents, salts, and/or one or more other of any additional ingredients described herein. Other ophthalmically-administrable formulations which are useful include those which comprise the active ingredient in microcrystalline form and/or in a liposomal preparation. Subretinal inserts may also be used as form of administration.

### Payload Administration: Detectable Agents and Therapeutic Agents

[0331] GDAs described herein can be used in a number of different scenarios in which delivery of a substance (the “payload”) to a biological target is desired, for example delivery of detectable substances for detection of the target, or delivery of a therapeutic or diagnostic agent. Detection methods can include, but are not limited to, both imaging in vitro and in vivo imaging methods, e.g., immunohistochemistry, bioluminescence imaging (BLI), Magnetic Resonance Imaging (MRI), positron emission tomography (PET), electron microscopy, X-ray computed tomography, Raman imaging, optical coherence tomography, absorption imaging, thermal imaging, fluorescence reflectance imaging, fluorescence microscopy, fluorescence molecular tomographic imaging, nuclear magnetic resonance imaging, X-ray imaging, ultrasound imaging, photoacoustic imaging, lab assays, or in any situation where tagging/staining/imaging is required.

[0332] GDAs can be designed to include both a linker and a payload in any useful orientation. For example, a linker having two ends is used to attach one end to the payload and the other end to the GDA. The GDAs of the invention can include more than one payload as well as a cleavable linker. In another example, a drug that may be attached to the GDAs via a linker and may be fluorescently labeled can be used to track the drug in vivo, e.g. intracellularly.

[0333] Other examples include, but are not limited to, the use of GDAs in reversible drug delivery into cells.

[0334] GDAs described herein can be used in intracellular targeting of a payload, e.g., detectable or therapeutic agent, to specific organelle. In addition, the GDAs described herein can be used to deliver therapeutic agents to cells or tissues, e.g., in living animals. For example, the GDAs described herein can be used to deliver chemotherapeutics agents to kill cancer cells. The GDAs attached to the therapeutic agent through a linker can facilitate member permeation allowing the therapeutic agent to travel into a cell to reach an intracellular target.

[0335] In some embodiments, the payload may be a therapeutic agent such as a cytotoxin, radioactive ion, chemotherapeutic, or other therapeutic agent. A cytotoxin or cytotoxic agent includes any agent that may be detrimental to cells. Examples include, but are not limited to, taxol, cytochalasin B, gramicidin D, ethidium bromide, emetine, mitomycin, etoposide, teniposide, vincristine, vinblastine, colchicine, doxorubicin, daunorubicin, dihydroxyanthracinedione, mitoxantrone, mithramycin, actinomycin D, 1-dehydrotestosterone, glucocorticoids, procaine, tetracaine, lidocaine, propranolol, puromycin, maytansinoids, e.g., maytansinol (see U.S. Pat. No. 5,208,020 incorporated herein in its entirety), rachelmycin (CC-1065, see U.S. Pat. Nos. 5,475,092, 5,585,499, and 5,846,545, all of which are incorporated herein by reference), and analogs or homologs thereof. Radioactive ions include, but are not limited to iodine (e.g., iodine 125 or iodine 131), strontium 89, phosphorous, palladium, cesium, iridium, phosphate, cobalt, yttrium 90, samarium 153, and praseodymium. Other therapeutic agents include, but are not limited to, antimetabolites (e.g., methotrexate, 6-mercaptopurine, 6-thioguanine, cytarabine, 5-fluorouracil decarbazine), alkylating agents (e.g., mechlorethamine, thiotepa chlorambucil, rachelmycin (CC-1065), melphalan, carmustine (BSNU), lomustine (CCNU), cyclophosphamide, busulfan, dibromomannitol, streptozotocin, mitomycin C, and cis-dichlorodiamine platinum (II) (DDP) cisplatin), anthracyclines (e.g., daunorubicin (formerly daunomycin) and doxorubicin), antibiotics (e.g., dactinomycin (formerly actinomycin), bleomycin, mithramycin, and anthramycin (AMC)), and anti-mitotic agents (e.g., vincristine, vinblastine, taxol and maytansinoids).

[0336] In some embodiments, the payload may be a detectable agent, such as various organic small molecules, inorganic compounds, nanoparticles, enzymes or enzyme substrates, fluorescent materials, luminescent materials (e.g., luminol), bioluminescent materials (e.g., luciferase, luciferin, and aequorin), chemiluminescent materials, radioactive materials (e.g., ¹⁸F, ⁶⁷Ga, ^{81m}Kr, ⁸²Rb, ¹¹¹In, ¹²³I, ₁₃₃Xe, ²⁰¹Tl, ¹²⁵I, ³⁵S, ¹⁴C ³H, or ^{99m}Tc (e.g., as pertechnetate (technetate(VII), TcO₄⁻)), and contrast agents (e.g., gold (e.g., gold nanoparticles), gadolinium (e.g., chelated Gd), iron oxides (e.g., superparamagnetic iron oxide (SPIO), monocrystalline iron oxide nanoparticles (MIONs), and ultrasmall superparamagnetic iron oxide (USPIO)), manganese chelates (e.g., Mn-DPDP), barium sulfate, iodinated contrast media (iohexol), microbubbles, or perfluorocarbons). Such optically-detectable labels include for example, without limitation, 4-acetamido-4′-isothiocyanatostilbene-2,2′disulfonic acid; acridine and derivatives (e.g., acridine and acridine isothiocyanate); 5-(2′-aminoethyl)aminonaphthalene-1-sulfonic acid (EDANS); 4-amino-N-[3-vinylsulfonyl)phenyl]naphthalimide-3,5 disulfonate; N-(4-anilino-1-naphthyl)maleimide; anthranilamide; BODIPY; Brilliant Yellow; coumarin and derivatives (e.g., coumarin, 7-amino-4-methylcoumarin (AMC, Coumarin 120), and 7-amino-4-trifluoromethylcoumarin (Coumarin 151)); cyanine dyes; cyanosine; 4′,6-diaminidino-2-phenylindole (DAPI); 5′ 5″-dibromopyrogallol-sulfonaphthalein (Bromopyrogallol Red); 7-diethylamino-3-(4′-isothiocyanatophenyl)-4-methylcoumarin; diethylenetriamine pentaacetate; 4,4′-diisothiocyanatodihydro-stilbene-2,2′-disulfonic acid; 4,4′-diisothiocyanatostilbene-2,2′-disulfonic acid; 5-[dimethylamino]-naphthalene-1-sulfonyl chloride (DNS, dansylchloride); 4-dimethylaminophenylazophenyl-4′-isothiocyanate (DABITC); eosin and derivatives (e.g., eosin and eosin isothiocyanate); erythrosin and derivatives (e.g., erythrosin B and erythrosin isothiocyanate); ethidium; fluorescein and derivatives (e.g., 5-carboxyfluorescein (FAM), 5-(4,6-dichlorotriazin-2-yl)aminofluorescein (DTAF), 2′,7′-dimethoxy-4′5′-dichloro-6-carboxyfluorescein, fluorescein, fluorescein isothiocyanate, X-rhodamine-5-(and-6)-isothiocyanate (QFITC or XRITC), and fluorescamine); 2-[2-[3-[[1,3-dihydro-1,1-dimethyl-3-(3-sulfopropyl)-2H-benz[e]indol-2-ylidene]ethylidene]-2-[4-(ethoxycarbonyl)-1-piperazinyl]-1-cyclopenten-1-yl]ethenyl]-1,1-dimethyl-3-(3-sulforpropyl)-1H-benz[e]indolium hydroxide, inner salt, compound with n,n-diethylethanamine(1:1) (IR144); 5-chloro-2-[2-[3-[(5-chloro-3-ethyl-2(3H)-benzothiazol-ylidene)ethylidene]-2-(diphenylamino)-1-cyclopenten-1-yl]ethenyl]-3-ethyl benzothiazolium perchlorate (IR140); Malachite Green isothiocyanate; 4-methylumbelliferone orthocresolphthalein; nitrotyrosine; pararosaniline; Phenol Red; B-phycoerythrin; o-phthaldialdehyde; pyrene and derivatives (e.g., pyrene, pyrene butyrate, and succinimidyl 1-pyrene); butyrate quantum dots; Reactive Red 4 (CIBACRON™ Brilliant Red 3B-A); rhodamine and derivatives (e.g., 6-carboxy-X-rhodamine (ROX), 6-carboxyrhodamine (R6G), lissamine rhodamine B sulfonyl chloride rhodarnine (Rhod), rhodamine B, rhodamine 123, rhodamine X isothiocyanate, sulforhodamine B, sulforhodamine 101, sulfonyl chloride derivative of sulforhodamine 101 (Texas Red), N,N,N′,N letramethyl-6-carboxyrhodamine (TAMRA) tetramethyl rhodamine, and tetramethyl rhodamine isothiocyanate (TRITC)); riboflavin; rosolic acid; terbium chelate derivatives; Cyanine-3 (Cy3); Cyanine-5 (Cy5); cyanine-5.5 (Cy5.5), Cyanine-7 (Cy7); IRD 700; IRD 800; Alexa 647; La Jolta Blue; phthalo cyanine; and naphthalo cyanine.

[0337] In some embodiments, the detectable agent may be a non-detectable precursor that becomes detectable upon activation (e.g., fluorogenic tetrazine-fluorophore constructs (e.g., tetrazine-BODIPY FL, tetrazine-Oregon Green 488, or tetrazine-BODIPY TMR-X) or enzyme activatable fluorogenic agents (e.g., PROSENSE® (VisEn Medical))). In vitro assays in which the enzyme labeled compositions can be used include, but are not limited to, enzyme linked immunosorbent assays (ELISAs), immunoprecipitation assays, immunofluorescence, enzyme immunoassays (EIA), radioimmunoassays (RIA), and Western blot analysis.

### Combinations

[0338] The GDAs may be used in combination with one or more other therapeutic, prophylactic, diagnostic, or imaging agents. By “in combination with,” it is not intended to imply that the agents must be administered at the same time and/or formulated for delivery together, although these methods of delivery are within the scope of the present disclosure. Compositions can be administered concurrently with, prior to, or subsequent to, one or more other desired therapeutics or medical procedures. In general, each agent will be administered at a dose and/or on a time schedule determined for that agent. In some embodiments, the present disclosure encompasses the delivery of pharmaceutical, prophylactic, diagnostic, or imaging compositions in combination with agents that may improve their bioavailability, reduce and/or modify their metabolism, inhibit their excretion, and/or modify their distribution within the body.

### Dosing and Dosage Forms

[0339] The present disclosure encompasses delivery of GDAs for any of therapeutic, pharmaceutical, diagnostic or imaging by any appropriate route taking into consideration likely advances in the sciences of drug delivery. Delivery may be naked or formulated.

### Naked Delivery

[0340] GDAs of the present invention may be delivered to cells, tissues, organs or organisms in naked form. As used herein in, the term “naked” refers to GDAs delivered free from agents or modifications which promote transfection or permeability. The naked GDAs may be delivered to the cell, tissue, organ or organism using routes of administration known in the art and described herein. Naked delivery may include formulation in a simple buffer such as saline or PBS.

### Formulated Delivery

[0341] GDAs of the present invention may be formulated, using methods described herein. Formulations may contain GDAs which may be modified and/or unmodified. Formulations may further include, but are not limited to, cell penetration agents, pharmaceutically acceptable carriers, delivery agents, bioerodible or biocompatible polymers, solvents, and sustained-release delivery depots. Formulated GDAs may be delivered to cells using routes of administration known in the art and described herein.

[0342] Compositions may also be formulated for direct delivery to organs or tissues in any of several ways in the art including, but not limited to, direct soaking or bathing, via a catheter, by gels, powder, ointments, creams, gels, lotions, and/or drops, by using substrates such as fabric or biodegradable materials coated or impregnated with compositions, and the like.

### Dosing

[0343] The present invention provides methods comprising administering one or more GDAs in accordance with the invention to a subject in need thereof. Nucleic acids encoding GDAs, proteins or complexes comprising GDAs, or pharmaceutical, imaging, diagnostic, or prophylactic compositions thereof, may be administered to a subject using any amount and any route of administration effective for preventing, treating, diagnosing, or imaging a disease, disorder, and/or condition. The exact amount required will vary from subject to subject, depending on the species, age, and general condition of the subject, the severity of the disease, the particular composition, its mode of administration, its mode of activity, and the like. Compositions in accordance with the invention are typically formulated in dosage unit form for ease of administration and uniformity of dosage. It will be understood, however, that the total daily usage of the compositions of the present invention will be decided by the attending physician within the scope of sound medical judgment. The specific therapeutically effective, prophylactically effective, or appropriate imaging dose level for any particular patient will depend upon a variety of factors including the disorder being treated and the severity of the disorder; the activity of the specific compound employed; the specific composition employed; the age, body weight, general health, sex and diet of the patient; the time of administration, route of administration, and rate of excretion of the specific compound employed; the duration of the treatment; drugs used in combination or coincidental with the specific compound employed; and like factors well known in the medical arts.

[0344] In certain embodiments, compositions in accordance with the present invention may be administered at dosage levels sufficient to deliver from about 0.0001 mg/kg to about 100 mg/kg, from about 0.01 mg/kg to about 50 mg/kg, from about 0.1 mg/kg to about 40 mg/kg, from about 0.5 mg/kg to about 30 mg/kg, from about 0.01 mg/kg to about 10 mg/kg, from about 0.1 mg/kg to about 10 mg/kg, or from about 1 mg/kg to about 25 mg/kg, of subject body weight per day, one or more times a day, to obtain the desired therapeutic, diagnostic, prophylactic, or imaging effect. The desired dosage may be delivered three times a day, two times a day, once a day, every other day, every third day, every week, every two weeks, every three weeks, or every four weeks. In certain embodiments, the desired dosage may be delivered using multiple administrations (e.g., two, three, four, five, six, seven, eight, nine, ten, eleven, twelve, thirteen, fourteen, or more administrations).

[0345] According to the present invention, GDAs may be administered in split-dose regimens. As used herein, a “split dose” is the division of single unit dose or total daily dose into two or more doses, e.g., two or more administrations of the single unit dose. As used herein, a “single unit dose” is a dose of any therapeutic administered in one dose/at one time/single route/single point of contact, i.e., single administration event. As used herein, a “total daily dose” is an amount given or prescribed in 24 hr period. It may be administered as a single unit dose. In one embodiment, the GDA of the present invention are administered to a subject in split doses. The GDA may be formulated in buffer only or in a formulation described herein. A GDA pharmaceutical composition described herein can be formulated into a dosage form described herein, such as a topical, intranasal, intratracheal, or injectable (e.g., intravenous, intraocular, intravitreal, intramuscular, intracardiac, intraperitoneal, subcutaneous). General considerations in the formulation and/or manufacture of pharmaceutical agents may be found, for example, in Remington: The Science and Practice of Pharmacy 21^{st} ed., Lippincott Williams & Wilkins, 2005 (incorporated herein by reference).

### Coatings or Shells

[0346] Solid dosage forms of tablets, dragees, capsules, pills, and granules can be prepared with coatings and shells such as enteric coatings and other coatings well known in the pharmaceutical formulating art. They may optionally comprise opacifying agents and can be of a composition that they release the active ingredient(s) only, or preferentially, in a certain part of the intestinal tract, optionally, in a delayed manner. Examples of embedding compositions which can be used include polymeric substances and waxes. Solid compositions of a similar type may be employed as fillers in soft and hard-filled gelatin capsules using such excipients as lactose or milk sugar as well as high molecular weight polyethylene glycols and the like.

### V. KITS AND DEVICES

### Kits

[0347] Any of the compositions described herein may be comprised in a kit. In a non-limiting example, reagents for generating GDAs, including antigen molecules are included in a kit. The kit may further include reagents or instructions for creating or synthesizing the GDA. It may also include one or more buffers. Other kits of the invention may include components for making a GDA protein or nucleic acid array or library and thus, may include, for example, a solid support.

[0348] The components of the kits may be packaged either in aqueous media or in lyophilized form. The container means of the kits will generally include at least one vial, test tube, flask, bottle, syringe or other container means, into which a component may be placed, and preferably, suitably aliquoted. Where there are more than one component in the kit (labeling reagent and label may be packaged together), the kit also will generally contain a second, third or other additional container into which the additional components may be separately placed. The kits may also comprise a second container means for containing a sterile, pharmaceutically acceptable buffer and/or other diluent. However, various combinations of components may be comprised in a vial. The kits of the present invention also will typically include a means for containing the GDAs, e.g., proteins, nucleic acids, and any other reagent containers in close confinement for commercial sale. Such containers may include injection or blow-molded plastic containers into which the desired vials are retained.

[0349] When the components of the kit are provided in one and/or more liquid solutions, the liquid solution is an aqueous solution, with a sterile aqueous solution being particularly preferred. However, the components of the kit may be provided as dried powder(s). When reagents and/or components are provided as a dry powder, the powder can be reconstituted by the addition of a suitable solvent. It is envisioned that the solvent may also be provided in another container means. In some embodiments, labeling dyes are provided as a dried power. It is contemplated that 10, 20, 30, 40, 50, 60, 70, 80, 90, 100, 120, 120, 130, 140, 150, 160, 170, 180, 190, 200, 300, 400, 500, 600, 700, 800, 900, 1000 micrograms or at least or at most those amounts of dried dye are provided in kits of the invention. The dye may then be resuspended in any suitable solvent, such as DMSO.

[0350] A kit can include instructions for employing the kit components as well the use of any other reagent not included in the kit. Instructions may include variations that can be implemented.

### Devices

[0351] Any of the compositions described herein may be combined with, coated onto or embedded in a device. Devices include, but are not limited to, dental implants, stents, bone replacements, artificial joints, valves, pacemakers or other implantable therapeutic device.

### VI. DEFINITIONS

[0352] At various places in the present specification, substituents of compounds of the present disclosure are disclosed in groups or in ranges. It is specifically intended that the present disclosure include each and every individual subcombination of the members of such groups and ranges. The following is a non-limiting list of term definitions.

[0353] Activity: As used herein, the term “activity” means the condition in which things are happening or being done. Compositions of the invention may have activity and this activity may involve one or more biological events which affect growth factors, receptors, GDAs, GPCs and/or GPC modulatory factors. In some embodiments, the biological event may include cell signaling events associated with growth factor and receptor interactions. In some embodiments, the biological event may include cell signaling events associated with TGF-beta or TGF-beta family member interactions with one or more corresponding receptors.

[0354] Administered in combination: As used herein, the term “administered in combination” or “combined administration” means that a subject is simultaneously exposed to two or more agents administered at the same time or within an interval such that the subject is at some point in time simultaneously exposed to both and/or such that there may be an overlap in the effect of each agent on the patient. In some embodiments, at least one dose of one or more agents is administered within about 24 hours, 12 hours, 6 hours, 3 hours, 1 hour, 30 minutes, 15 minutes, 10 minutes, 5 minutes, or 1 minute of at least one dose of one or more other agents. In some embodiments, administration occurs in overlapping dosage regimens. As used herein, the term “dosage regimen” refers to a plurality of doses spaced apart in time. Such doses may occur at regular intervals or may include one or more hiatus in administration. In some embodiments, the administration of individual doses of one or more GDAs, as described herein, are spaced sufficiently closely together such that a combinatorial (e.g., a synergistic) effect is achieved.

[0355] Animal: As used herein, the term “animal” refers to any member of the animal kingdom. In some embodiments, “animal” refers to humans at any stage of development. In some embodiments, “animal” refers to non-human animals at any stage of development. In certain embodiments, the non-human animal is a mammal (e.g., a rodent, a mouse, a rat, a rabbit, a monkey, a dog, a cat, a sheep, cattle, a primate, or a pig). In some embodiments, animals include, but are not limited to, mammals, birds, reptiles, amphibians, fish, and worms. In some embodiments, the animal is a transgenic animal, genetically-engineered animal, or a clone.

[0356] Antigens of interest or desired antigens: As used herein, the terms “antigens of interest” or “desired antigens” include those proteins and other biomolecules provided herein that are immunospecifically bound or interact with by the antibodies and fragments, mutants, variants, and alterations thereof described herein. In some embodiments, an antigen of interest may comprise a growth factor, growth factor regulatory element, prodomain, GPC, GPC modulatory factor, ECCM or a region of overlap between them.

[0357] Approximately: As used herein, the term “approximately” or “about,” as applied to one or more values of interest, refers to a value that is similar to a stated reference value. In certain embodiments, the term “approximately” or “about” refers to a range of values that fall within 25%, 20%, 19%, 18%, 17%, 16%, 15%, 14%, 13%, 12%, 11%, 10%, 9%, 8%, 7%, 6%, 5%, 4%, 3%, 2%, 1%, or less in either direction (greater than or less than) of the stated reference value unless otherwise stated or otherwise evident from the context (except where such number would exceed 100% of a possible value).

[0358] Associated with: As used herein, the terms “associated with,” “conjugated,” “linked,” “attached,” and “tethered,” when used with respect to two or more moieties, means that the moieties are physically associated or connected with one another, either directly or via one or more additional moieties that serves as a linking agent, to form a structure that is sufficiently stable so that the moieties remain physically associated under the conditions in which the structure is used, e.g., physiological conditions. An “association” need not be strictly through direct covalent chemical bonding. It may also suggest ionic or hydrogen bonding or a hybridization based connectivity sufficiently stable such that the “associated” entities remain physically associated.

[0359] Bifunctional: As used herein, the term “bifunctional” refers to any substance, molecule or moiety which is capable of or maintains at least two functions. The functions may affect the same outcome or a different outcome. The structure that produces the function may be the same or different.

[0360] Biomolecule: As used herein, the term “biomolecule” is any natural molecule which is amino acid-based, nucleic acid-based, carbohydrate-based or lipid-based, and the like.

[0361] Biologically active: As used herein, the phrase “biologically active” refers to a characteristic of any substance that has activity in a biological system and/or organism. For instance, a substance that, when administered to an organism, has a biological effect on that organism, is considered to be biologically active. In particular embodiments, a GDA of the present invention may be considered biologically active if even a portion of the GDA is biologically active or mimics an activity considered biologically relevant.

[0362] Biological system: As used herein, the term “biological system” refers to a group of organs, tissues, cells, intracellular components, proteins, nucleic acids, molecules (including, but not limited to biomolecules) that function together to perform a certain biological task within cellular membranes, cellular compartments, cells, tissues, organs, organ systems, multicellular organisms, or any biological entity. In some embodiments, biological systems are cell signaling pathways comprising intracellular and/or extracellular cell signaling biomolecules. In some embodiments, biological systems comprise growth factor signaling events within the ECCM and/or cellular niches.

[0363] Compound: As used herein, the term “compound,” refers to a distinct chemical entity. In some embodiments, a particular compound may exist in one or more isomeric or isotopic forms (including, but not limited to stereoisomers, geometric isomers and isotopes). In some embodiments, a compound is provided or utilized in only a single such form. In some embodiments, a compound is provided or utilized as a mixture of two or more such forms (including, but not limited to a racemic mixture of stereoisomers). Those of skill in the art appreciate that some compounds exist in different such forms, show different properties and/or activities (including, but not limited to biological activities). In such cases it is within the ordinary skill of those in the art to select or avoid particular forms of the compound for use in accordance with the present invention. For example, compounds that contain asymmetrically substituted carbon atoms can be isolated in optically active or racemic forms. Methods on how to prepare optically active forms from optically active starting materials are known in the art, such as by resolution of racemic mixtures or by stereoselective synthesis.

[0364] Conserved: As used herein, the term “conserved” refers to nucleotides or amino acid residues of a polynucleotide sequence or polypeptide sequence, respectively, that are those that occur unaltered in the same position of two or more sequences being compared. Nucleotides or amino acids that are relatively conserved are those that are conserved among more related sequences than nucleotides or amino acids appearing elsewhere in the sequences.

[0365] In some embodiments, two or more sequences are said to be “completely conserved” if they are 100% identical to one another. In some embodiments, two or more sequences are said to be “highly conserved” if they are at least 70% identical, at least 80% identical, at least 90% identical, or at least 95% identical to one another. In some embodiments, two or more sequences are said to be “highly conserved” if they are about 70% identical, about 80% identical, about 90% identical, about 95%, about 98%, or about 99% identical to one another. In some embodiments, two or more sequences are said to be “conserved” if they are at least 30% identical, at least 40% identical, at least 50% identical, at least 60% identical, at least 70% identical, at least 80% identical, at least 90% identical, or at least 95% identical to one another. In some embodiments, two or more sequences are said to be “conserved” if they are about 30% identical, about 40% identical, about 50% identical, about 60% identical, about 70% identical, about 80% identical, about 90% identical, about 95% identical, about 98% identical, or about 99% identical to one another. Conservation of sequence may apply to the entire length of an oligonucleotide or polypeptide or may apply to a portion, region or feature thereof.

[0366] In one embodiment, conserved sequences are not contiguous. Those skilled in the art are able to appreciate how to achieve alignment when gaps in contiguous alignment are present between sequences, and to align corresponding residues not withstanding insertions or deletions present.

[0367] Cyclic or Cyclized: As used herein, the term “cyclic” refers to the presence of a continuous loop. Cyclic molecules need not be circular, only joined to form an unbroken chain of subunits. Cyclic molecules such as certain GDAs as described herein may be single units or multimers or comprise one or more components of a complex or higher order structure.

[0368] Cytostatic: As used herein, the term “cytostatic” is used to refer an agent that inhibits, reduces or suppresses the growth, division, or multiplication of a cell (e.g., a mammalian cell (e.g., a human cell)), bacterium, virus, fungus, protozoan, parasite, prion, or a combination thereof.

[0369] Cytotoxic: As used herein, the term “cytotoxic” is used to refer to an agent that kills or causes injurious, toxic, or deadly effects on a cell (e.g., a mammalian cell (e.g., a human cell)), bacterium, virus, fungus, protozoan, parasite, prion, or a combination thereof.

[0370] Delivery: As used herein, “delivery” refers to the act or manner of delivering a compound, substance, entity, moiety, cargo or payload.

[0371] Delivery Agent: As used herein, “delivery agent” refers to any substance which facilitates, at least in part, the in vivo delivery of an agent (including, but not limited to a GDA) to targeted cells.

[0372] Destabilized: As used herein, the term “destable,” “destabilize,” or “destabilizing region” means a region or molecule that is less stable than a starting, reference, wild-type or native form of the same region or molecule.

[0373] Detectable label: As used herein, “detectable label” refers to one or more markers, signals, or moieties which are attached, incorporated or associated with another entity, which markers, signals or moieties are readily detected by methods known in the art including radiography, fluorescence, chemiluminescence, enzymatic activity, absorbance and the like. Detectable labels include radioisotopes, fluorophores, chromophores, enzymes, dyes, metal ions, ligands such as biotin, avidin, streptavidin and haptens, quantum dots, and the like. Detectable labels may be located at any position in the entity with which they are attached, incorporated or associated. For example, when attached, incorporated in or associated with a peptide or protein, they may be within the amino acids, the peptides, or proteins, or located at the N- or C-termini.

[0374] Distal: As used herein, the term “distal” means situated away from the center or away from a point or region of interest.

[0375] Engineered: As used herein, embodiments of the invention are “engineered” when they are designed to have a feature or property, whether structural or chemical, that varies from a starting point, wild type or native molecule. Thus, engineered agents or entities are those whose design and/or production include an act of the hand of man.

[0376] Expression: As used herein, “expression” of a nucleic acid sequence refers to one or more of the following events: (1) production of an RNA template from a DNA sequence (e.g., by transcription); (2) processing of an RNA transcript (e.g., by splicing, editing, 5′ cap formation, and/or 3′ end processing); (3) translation of an RNA into a polypeptide or protein; (4) folding of a polypeptide or protein; and (5) post-translational modification of a polypeptide or protein.

[0377] Feature: As used herein, a “feature” refers to a characteristic, a property, or a distinctive element.

[0378] Formulation: As used herein, a “formulation” includes at least a GDA and a delivery agent.

[0379] Fragment: A “fragment,” as used herein, refers to a portion. For example, fragments of proteins may comprise polypeptides obtained by digesting full-length protein isolated from cultured cells. In some embodiments, a fragment of a protein includes at least 3, 4, 5, 6, 7, 8, 9, 10, 11, 12, 13, 14, 15, 16, 17, 18, 19, 20, 25, 30, 35, 40, 45, 50, 55, 60, 65, 70, 75, 80, 85, 90, 95, 100, 150, 200, 250 or more amino acids. In some embodiments, fragments of an antibody include portions of an antibody subjected to enzymatic digestion or synthesized as such.

[0380] Functional: As used herein, a “functional” biological molecule is a biological entity with a structure and in a form in which it exhibits a property and/or activity by which it is characterized.

[0381] Homology: As used herein, the term “homology” refers to the overall relatedness between polymeric molecules, e.g. between nucleic acid molecules (e.g. DNA molecules and/or RNA molecules) and/or between polypeptide molecules. In some embodiments, polymeric molecules are considered to be “homologous” to one another if their sequences are at least 25%, 30%, 35%, 40%, 45%, 50%, 55%, 60%, 65%, 70%, 75%, 80%, 85%, 90%, 95%, or 99% identical or similar. The term “homologous” necessarily refers to a comparison between at least two sequences (polynucleotide or polypeptide sequences). In accordance with the invention, two polynucleotide sequences are considered to be homologous if the polypeptides they encode are at least about 50%, 60%, 70%, 80%, 90%, 95%, or even 99% for at least one stretch of at least about 20 amino acids. In some embodiments, homologous polynucleotide sequences are characterized by the ability to encode a stretch of at least 4-5 uniquely specified amino acids. For polynucleotide sequences less than 60 nucleotides in length, homology is typically determined by the ability to encode a stretch of at least 4-5 uniquely specified amino acids. In accordance with the invention, two protein sequences are considered to be homologous if the proteins are at least about 50%, 60%, 70%, 80%, or 90% identical for at least one stretch of at least about 20 amino acids. In many embodiments, homologous protein may show a large overall degree of homology and a high degree of homology over at least one short stretch of at least 3, 4, 5, 6, 7, 8, 9, 10, 11, 12, 13, 14, 15, 16, 17, 18, 19, 20, 25, 30, 35, 40, 45, 50 or more amino acids. In many embodiments, homologous proteins share one or more characteristic sequence elements. As used herein, the term “characteristic sequence element” refers to a motif present in related proteins. In some embodiments, the presence of such motifs correlates with a particular activity (such as biological activity).

[0382] Identity: As used herein, the term “identity” refers to the overall relatedness between polymeric molecules, e.g., between oligonucleotide molecules (e.g. DNA molecules and/or RNA molecules) and/or between polypeptide molecules. Calculation of the percent identity of two polynucleotide sequences, for example, can be performed by aligning the two sequences for optimal comparison purposes (e.g., gaps can be introduced in one or both of a first and a second nucleic acid sequences for optimal alignment and non-identical sequences can be disregarded for comparison purposes). In certain embodiments, the length of a sequence aligned for comparison purposes is at least 30%, at least 40%, at least 50%, at least 60%, at least 70%, at least 80%, at least 90%, at least 95%, or 100% of the length of the reference sequence. The nucleotides at corresponding nucleotide positions are then compared. When a position in the first sequence is occupied by the same nucleotide as the corresponding position in the second sequence, then the molecules are identical at that position. The percent identity between the two sequences is a function of the number of identical positions shared by the sequences, taking into account the number of gaps, and the length of each gap, which needs to be introduced for optimal alignment of the two sequences. The comparison of sequences and determination of percent identity between two sequences can be accomplished using a mathematical algorithm. For example, the percent identity between two nucleotide sequences can be determined using methods such as those described in Computational Molecular Biology, Lesk, A. M., ed., Oxford University Press, New York, 1988; Biocomputing: Informatics and Genome Projects, Smith, D. W., ed., Academic Press, New York, 1993; Sequence Analysis in Molecular Biology, von Heinje, G., Academic Press, 1987; Computer Analysis of Sequence Data, Part I, Griffin, A. M., and Griffin, H. G., eds., Humana Press, New Jersey, 1994; and Sequence Analysis Primer, Gribskov, M. and Devereux, J., eds., M Stockton Press, New York, 1991; each of which is incorporated herein by reference. For example, the percent identity between two nucleotide sequences can be determined, for example using the algorithm of Meyers and Miller (CABIOS, 1989, 4:11-17), which has been incorporated into the ALIGN program (version 2.0) using a PAM120 weight residue table, a gap length penalty of 12 and a gap penalty of 4. The percent identity between two nucleotide sequences can, alternatively, be determined using the GAP program in the GCG software package using an NWSgapdna.CMP matrix. Methods commonly employed to determine percent identity between sequences include, but are not limited to those disclosed in Carillo, H., and Lipman, D., SIAM J Applied Math., 48:1073 (1988); incorporated herein by reference. Techniques for determining identity are codified in publicly available computer programs. Exemplary computer software to determine homology between two sequences include, but are not limited to, GCG program package, Devereux, J., et al., Nucleic Acids Research, 12(1), 387 (1984)), BLASTP, BLASTN, and FASTA Altschul, S. F. et al., J. Molec. Biol., 215, 403 (1990)).

[0383] Inhibit expression of a gene: As used herein, the phrase “inhibit expression of a gene” means to cause a reduction in the amount of an expression product of the gene. The expression product can be an RNA transcribed from the gene (e.g., an mRNA) or a polypeptide translated from an mRNA transcribed from the gene. Typically a reduction in the level of an mRNA results in a reduction in the level of a polypeptide translated therefrom. The level of expression may be determined using standard techniques for measuring mRNA or protein.

[0384] In vitro: As used herein, the term “in vitro” refers to events that occur in an artificial environment, e.g., in a test tube or reaction vessel, in cell culture, in a Petri dish, etc., rather than within an organism (e.g., animal, plant, or microbe).

[0385] In vivo: As used herein, the term “in vivo” refers to events that occur within an organism (e.g., animal, plant, or microbe or cell or tissue thereof).

[0386] Isolated: As used herein, the term “isolated” is synonymous with “separated”, but carries with it the inference separation was carried out by the hand of man. In one embodiment, an isolated substance or entity is one that has been separated from at least some of the components with which it was previously associated (whether in nature or in an experimental setting). Isolated substances may have varying levels of purity in reference to the substances from which they have been associated. Isolated substances and/or entities may be separated from at least about 10%, about 20%, about 30%, about 40%, about 50%, about 60%, about 70%, about 80%, about 90%, or more of the other components with which they were initially associated. In some embodiments, isolated agents are more than about 80%, about 85%, about 90%, about 91%, about 92%, about 93%, about 94%, about 95%, about 96%, about 97%, about 98%, about 99%, or more than about 99% pure. As used herein, a substance is “pure” if it is substantially free of other components.

[0387] Substantially isolated: By “substantially isolated” is meant that the compound is substantially separated from the environment in which it was formed or detected. Partial separation can include, for example, a composition enriched in the compound of the present disclosure. Substantial separation can include compositions containing at least about 50%, at least about 60%, at least about 70%, at least about 80%, at least about 90%, at least about 95%, at least about 97%, or at least about 99% by weight of the compound of the present disclosure, or salt thereof. Methods for isolating compounds and their salts are routine in the art. In some embodiments, isolation of a substance or entity includes disruption of chemical associations and/or bonds. In some embodiments, isolation includes only the separation from components with which the isolated substance or entity was previously combined and does not include such disruption.

[0388] Linker: As used herein, a linker refers to a moiety that connects two or more domains, moieties or entities. In one embodiment, a linker may comprise 10 or more atoms. In a further embodiment, a linker may comprise a group of atoms, e.g., 10-1,000 atoms, and can be comprised of the atoms or groups such as, but not limited to, carbon, amino, alkylamino, oxygen, sulfur, sulfoxide, sulfonyl, carbonyl, and imine. In some embodiments, a linker may comprise one or more nucleic acids comprising one or more nucleotides. In some embodiments, the linker may comprise an amino acid, peptide, polypeptide or protein. In some embodiments, a moiety bound by a linker may include, but is not limited to an atom, a chemical group, a nucleoside, a nucleotide, a nucleobase, a sugar, a nucleic acid, an amino acid, a peptide, a polypeptide, a protein, a protein complex, a payload (e.g., a therapeutic agent). or a marker (including, but not limited to a chemical, fluorescent, radioactive or bioluminescent marker). The linker can be used for any useful purpose, such as to form multimers or conjugates, as well as to administer a payload, as described herein. Examples of chemical groups that can be incorporated into the linker include, but are not limited to, alkyl, alkenyl, alkynyl, amido, amino, ether, thioether, ester, alkylene, heteroalkylene, aryl, or heterocyclyl, each of which can be optionally substituted, as described herein. Examples of linkers include, but are not limited to, unsaturated alkanes, polyethylene glycols (e.g., ethylene or propylene glycol monomeric units, e.g., diethylene glycol, dipropylene glycol, triethylene glycol, tripropylene glycol, tetraethylene glycol, or tetraethylene glycol), and dextran polymers, Other examples include, but are not limited to, cleavable moieties within the linker, such as, for example, a disulfide bond (—S—S—) or an azo bond (—N═N—), which can be cleaved using a reducing agent or photolysis. Non-limiting examples of a selectively cleavable bonds include an amido bond which may be cleaved for example by the use of tris(2-carboxyethyl)phosphine (TCEP), or other reducing agents, and/or photolysis, as well as an ester bond which may be cleaved for example by acidic or basic hydrolysis.

[0389] Modified: As used herein, the term “modified” refers to a changed state or structure of a molecule or entity as compared with a parent or reference molecule or entity. Molecules may be modified in many ways including chemically, structurally, and functionally. In some embodiments, GDAs of the present invention are modified by the introduction of non-natural amino acids.

[0390] Naturally occurring: As used herein, “naturally occurring” means existing in nature without artificial aid, or involvement of the hand of man.

[0391] Non-human vertebrate: As used herein, a “non human vertebrate” includes all vertebrates except Homo sapiens, including wild and domesticated species. Examples of non-human vertebrates include, but are not limited to, mammals, such as alpaca, banteng, bison, camel, cat, cattle, deer, dog, donkey, gayal, goat, guinea pig, horse, llama, mule, pig, rabbit, reindeer, sheep water buffalo, and yak.

[0392] Off-target: As used herein, “off target” refers to any unintended effect on any one or more target, gene, or cellular transcript.

[0393] Operably linked: As used herein, the phrase “operably linked” refers to a functional connection between two or more molecules, constructs, transcripts, entities, moieties or the like.

[0394] Paratope: As used herein, a “paratope” refers to the antigen-binding site of an antibody.

[0395] Patient: As used herein, “patient” refers to a subject who may seek or be in need of treatment, requires treatment, is receiving treatment, will receive treatment, or a subject who is under care by a trained (e.g., licensed) professional for a particular disease or condition.

[0396] Peptide: As used herein, “peptide” is less than or equal to 50 amino acids long, e.g., about 5, 10, 15, 20, 25, 30, 35, 40, 45, or 50 amino acids long.

[0397] Pharmaceutically acceptable: The phrase “pharmaceutically acceptable” is employed herein to refer to those compounds, materials, compositions, and/or dosage forms which are, within the scope of sound medical judgment, suitable for use in contact with the tissues of human beings and animals without excessive toxicity, irritation, allergic response, or other problem or complication, commensurate with a reasonable benefit/risk ratio.

[0398] Pharmaceutically acceptable excipients: The phrase “pharmaceutically acceptable excipient,” as used herein, refers any ingredient other than active agents (e.g., as described herein) present in a pharmaceutical composition and having the properties of being substantially nontoxic and non-inflammatory in a patient. In some embodiments, a pharmaceutically acceptable excipient is a vehicle capable of suspending or dissolving the active agent. Excipients may include, for example: antiadherents, antioxidants, binders, coatings, compression aids, disintegrants, dyes (colors), emollients, emulsifiers, fillers (diluents), film formers or coatings, flavors, fragrances, glidants (flow enhancers), lubricants, preservatives, printing inks, sorbents, suspensing or dispersing agents, sweeteners, and waters of hydration. Exemplary excipients include, but are not limited to: butylated hydroxytoluene (BHT), calcium carbonate, calcium phosphate (dibasic), calcium stearate, croscarmellose, crosslinked polyvinyl pyrrolidone, citric acid, crospovidone, cysteine, ethylcellulose, gelatin, hydroxypropyl cellulose, hydroxypropyl methylcellulose, lactose, magnesium stearate, maltitol, mannitol, methionine, methylcellulose, methyl paraben, microcrystalline cellulose, polyethylene glycol, polyvinyl pyrrolidone, povidone, pregelatinized starch, propyl paraben, retinyl palmitate, shellac, silicon dioxide, sodium carboxymethyl cellulose, sodium citrate, sodium starch glycolate, sorbitol, starch (corn), stearic acid, sucrose, talc, titanium dioxide, vitamin A, vitamin E, vitamin C, and xylitol.

[0399] Pharmaceutically acceptable salts: Pharmaceutically acceptable salts of the compounds described herein are forms of the disclosed compounds wherein the acid or base moiety is in its salt form (e.g., as generated by reacting a free base group with a suitable organic acid). Examples of pharmaceutically acceptable salts include, but are not limited to, mineral or organic acid salts of basic residues such as amines; alkali or organic salts of acidic residues such as carboxylic acids; and the like. Representative acid addition salts include acetate, adipate, alginate, ascorbate, aspartate, benzenesulfonate, benzoate, bisulfate, borate, butyrate, camphorate, camphorsulfonate, citrate, cyclopentanepropionate, digluconate, dodecylsulfate, ethanesulfonate, fumarate, glucoheptonate, glycerophosphate, hemisulfate, heptonate, hexanoate, hydrobromide, hydrochloride, hydroiodide, 2-hydroxy-ethanesulfonate, lactobionate, lactate, laurate, lauryl sulfate, malate, maleate, malonate, methanesulfonate, 2-naphthalenesulfonate, nicotinate, nitrate, oleate, oxalate, palmitate, pamoate, pectinate, persulfate, 3-phenylpropionate, phosphate, picrate, pivalate, propionate, stearate, succinate, sulfate, tartrate, thiocyanate, toluenesulfonate, undecanoate, valerate salts, and the like. Representative alkali or alkaline earth metal salts include sodium, lithium, potassium, calcium, magnesium, and the like, as well as nontoxic ammonium, quaternary ammonium, and amine cations, including, but not limited to ammonium, tetramethylammonium, tetraethylammonium, methylamine, dimethylamine, trimethylamine, triethylamine, ethylamine, and the like. Pharmaceutically acceptable salts include the conventional non-toxic salts, for example, from non-toxic inorganic or organic acids. In some embodiments a pharmaceutically acceptable salt is prepared from a parent compound which contains a basic or acidic moiety by conventional chemical methods. Generally, such salts can be prepared by reacting the free acid or base forms of these compounds with a stoichiometric amount of the appropriate base or acid in water or in an organic solvent, or in a mixture of the two; generally, nonaqueous media like ether, ethyl acetate, ethanol, isopropanol, or acetonitrile are preferred. Lists of suitable salts are found in Remington's Pharmaceutical Sciences, 17^{th} ed., Mack Publishing Company, Easton, Pa., 1985, p. 1418, Pharmaceutical Salts: Properties, Selection, and Use, P. H. Stahl and C. G. Wermuth (eds.), Wiley-VCH, 2008, and Berge et al., Journal of Pharmaceutical Science, 66, 1-19 (1977), each of which is incorporated herein by reference in its entirety. Pharmaceutically acceptable solvate: The term “pharmaceutically acceptable solvate,” as used herein, refers to a crystalline form of a compound wherein molecules of a suitable solvent are incorporated in the crystal lattice. For example, solvates may be prepared by crystallization, recrystallization, or precipitation from a solution that includes organic solvents, water, or a mixture thereof. Examples of suitable solvents are ethanol, water (for example, mono-, di-, and tri-hydrates), N-methylpyrrolidinone (NMP), dimethyl sulfoxide (DMSO), N,N′-dimethylformamide (DMF), N,N′-dimethylacetamide (DMAC), 1,3-dimethyl-2-imidazolidinone (DMEU), 1,3-dimethyl-3,4,5,6-tetrahydro-2-(1H)-pyrimidinone (DMPU), acetonitrile (ACN), propylene glycol, ethyl acetate, benzyl alcohol, 2-pyrrolidone, benzyl benzoate, and the like. When water is the solvent, the solvate is referred to as a “hydrate.” In some embodiments, the solvent incorporated into a solvate is of a type or at a level that is physiologically tolerable to an organism to which the solvate is administered (e.g., in a unit dosage form of a pharmaceutical composition).

[0400] Pharmacokinetic: As used herein, “pharmacokinetic” refers to any one or more properties of a molecule or compound as it relates to the determination of the fate of substances administered to a living organism. Pharmacokinetics is divided into several areas including the extent and rate of absorption, distribution, metabolism and excretion. This is commonly referred to as ADME where: (A) Absorption is the process of a substance entering the blood circulation; (D) Distribution is the dispersion or dissemination of substances throughout the fluids and tissues of the body; (M) Metabolism (or Biotransformation) is the irreversible transformation of parent compounds into daughter metabolites; and (E) Excretion (or Elimination) refers to the elimination of the substances from the body. In rare cases, some drugs irreversibly accumulate in body tissue.

[0401] Physicochemical: As used herein, “physicochemical” means of or relating to a physical and/or chemical property.

[0402] Preventing: As used herein, the term “preventing” refers to partially or completely delaying onset of an infection, disease, disorder and/or condition; partially or completely delaying onset of one or more symptoms, features, or clinical manifestations of a particular infection, disease, disorder, and/or condition; partially or completely delaying onset of one or more symptoms, features, or manifestations of a particular infection, disease, disorder, and/or condition; partially or completely delaying progression from an infection, a particular disease, disorder and/or condition; and/or decreasing the risk of developing pathology associated with the infection, the disease, disorder, and/or condition.

[0403] Prodrug: The present disclosure also includes prodrugs of the compounds described herein. As used herein, “prodrugs” refer to any substance, molecule or entity which is in a form predicate for that substance, molecule or entity to act as a therapeutic upon chemical or physical alteration. Prodrugs may by covalently bonded or sequestered in some way and which release or are converted into the active drug moiety prior to, upon or after administered to a mammalian subject. Prodrugs can be prepared by modifying functional groups present in the compounds in such a way that the modifications are cleaved, either in routine manipulation or in vivo, to the parent compounds. Prodrugs include compounds wherein hydroxyl, amino, sulfhydryl, or carboxyl groups are bonded to any group that, when administered to a mammalian subject, cleaves to form a free hydroxyl, amino, sulfhydryl, or carboxyl group respectively. Preparation and use of prodrugs is discussed in T. Higuchi and V. Stella, “Pro-drugs as Novel Delivery Systems,” Vol. 14 of the A.C.S. Symposium Series, and in Bioreversible Carriers in Drug Design, ed. Edward B. Roche, American Pharmaceutical Association and Pergamon Press, 1987, both of which are hereby incorporated by reference in their entirety.

[0404] Proliferate: As used herein, the term “proliferate” means to grow, expand, replicate or increase or cause to grow, expand, replicate or increase. “Proliferative” means having the ability to proliferate. “Anti-proliferative” means having properties counter to or in opposition to proliferative properties.

[0405] Protein of interest: As used herein, the terms “proteins of interest” or “desired proteins” include those provided herein and fragments, mutants, variants, and alterations thereof.

[0406] Proximal: As used herein, the term “proximal” means situated nearer to the center or to a point or region of interest.

[0407] Purified: As used herein, “purify,” means to make substantially pure or clear from unwanted components, material defilement, admixture or imperfection. “Purified” refers to the state of being pure. “Purification” refers to the process of making pure.

[0408] Sample: As used herein, the term “sample” refers to an aliquot or portion taken from a source and/or provided for analysis or processing. In some embodiments, a sample is from a biological source such as a tissue, cell or component part (e.g. a body fluid, including but not limited to blood, mucus, lymphatic fluid, synovial fluid, cerebrospinal fluid, saliva, amniotic fluid, amniotic cord blood, urine, vaginal fluid and semen). In some embodiments, a sample may be or comprise a homogenate, lysate or extract prepared from a whole organism or a subset of its tissues, cells or component parts, or a fraction or portion thereof, including but not limited to, for example, plasma, serum, spinal fluid, lymph fluid, the external sections of the skin, respiratory, intestinal, and genitourinary tracts, tears, saliva, milk, blood cells, tumors, organs. In some embodiments, a sample is a or comprises a medium, such as a nutrient broth or gel, which may contain cellular components, such as proteins or nucleic acid molecule. In some embodiments, a “primary” sample is an aliquot of the source. In some embodiments, a primary sample is subjected to one or more processing (e.g., separation, purification, etc.) steps to prepare a sample for analysis or other use.

[0409] Signal Sequences: As used herein, the phrase “signal sequences” refers to a sequence which can direct the transport or localization of a protein.

[0410] Single unit dose: As used herein, a “single unit dose” is a dose of any therapeutic administered in one dose/at one time/single route/single point of contact, i.e., single administration event. In some embodiments, a single unit dose is provided as a discrete dosage form (e.g., a tablet, capsule, patch, loaded syringe, vial, etc.).

[0411] Similarity: As used herein, the term “similarity” refers to the overall relatedness between polymeric molecules, e.g. between polynucleotide molecules (e.g. DNA molecules and/or RNA molecules) and/or between polypeptide molecules. Calculation of percent similarity of polymeric molecules to one another can be performed in the same manner as a calculation of percent identity, except that calculation of percent similarity takes into account conservative substitutions as is understood in the art.

[0412] Split dose: As used herein, a “split dose” is the division of single unit dose or total daily dose into two or more doses.

[0413] Stable: As used herein “stable” refers to a compound or entity that is sufficiently robust to survive isolation to a useful degree of purity from a reaction mixture, and preferably capable of formulation into an efficacious therapeutic agent.

[0414] Stabilized: As used herein, the term “stabilize”, “stabilized,” “stabilized region” means to make or become stable. In some embodiments, stability is measured relative to an absolute value. In some embodiments, stability is measured relative to a reference compound or entity.

[0415] Subject: As used herein, the term “subject” or “patient” refers to any organism to which a composition in accordance with the invention may be administered, e.g., for experimental, diagnostic, prophylactic, and/or therapeutic purposes. Typical subjects include animals (e.g., mammals such as mice, rats, rabbits, non-human primates, and humans) and/or plants.

[0416] Substantially: As used herein, the term “substantially” refers to the qualitative condition of exhibiting total or near-total extent or degree of a characteristic or property of interest. One of ordinary skill in the biological arts will understand that biological and chemical phenomena rarely, if ever, go to completion and/or proceed to completeness or achieve or avoid an absolute result. The term “substantially” is therefore used herein to capture the potential lack of completeness inherent in many biological and chemical phenomena.

[0417] Substantially equal: As used herein as it relates to time differences between doses, the term means plus/minus 2%.

[0418] Substantially simultaneously: As used herein and as it relates to plurality of doses, the term typically means within about 2 seconds.

[0419] Suffering from: An individual who is “suffering from” a disease, disorder, and/or condition has been diagnosed with or displays one or more symptoms of a disease, disorder, and/or condition.

[0420] Susceptible to: An individual who is “susceptible to” a disease, disorder, and/or condition has not been diagnosed with and/or may not exhibit symptoms of the disease, disorder, and/or condition but harbors a propensity to develop a disease or its symptoms. In some embodiments, an individual who is susceptible to a disease, disorder, and/or condition (for example, cancer) may be characterized by one or more of the following: (1) a genetic mutation associated with development of the disease, disorder, and/or condition; (2) a genetic polymorphism associated with development of the disease, disorder, and/or condition; (3) increased and/or decreased expression and/or activity of a protein and/or nucleic acid associated with the disease, disorder, and/or condition; (4) habits and/or lifestyles associated with development of the disease, disorder, and/or condition; (5) a family history of the disease, disorder, and/or condition; and (6) exposure to and/or infection with a microbe associated with development of the disease, disorder, and/or condition. In some embodiments, an individual who is susceptible to a disease, disorder, and/or condition will develop the disease, disorder, and/or condition. In some embodiments, an individual who is susceptible to a disease, disorder, and/or condition will not develop the disease, disorder, and/or condition.

[0421] Synthetic: The term “synthetic” means produced, prepared, and/or manufactured by the hand of man. Synthesis of polynucleotides or polypeptides or other molecules of the present invention may be chemical or enzymatic.

[0422] Targeted Cells: As used herein, “targeted cells” refers to any one or more cells of interest. The cells may be found in vitro, in vivo, in situ or in the tissue or organ of an organism. The organism may be an animal, preferably a mammal, more preferably a human and most preferably a patient.

[0423] Therapeutic Agent: The term “therapeutic agent” refers to any agent that, when administered to a subject, has a therapeutic, diagnostic, and/or prophylactic effect and/or elicits a desired biological and/or pharmacological effect.

[0424] Therapeutically effective amount: As used herein, the term “therapeutically effective amount” means an amount of an agent to be delivered (e.g., nucleic acid, drug, therapeutic agent, diagnostic agent, prophylactic agent, etc.) that is sufficient, when administered to a subject suffering from or susceptible to an infection, disease, disorder, and/or condition, to treat, improve symptoms of, diagnose, prevent, and/or delay the onset of the infection, disease, disorder, and/or condition. In some embodiments, a therapeutically effective amount is provided in a single dose. In some embodiments, a therapeutically effective amount is administered in a dosage regimen comprising a plurality of doses. Those skilled in the art will appreciate that in some embodiments, a unit dosage form may be considered to comprise a therapeutically effective amount of a particular agent or entity if it comprises an amount that is effective when administered as part of such a dosage regimen.

[0425] Therapeutically effective outcome: As used herein, the term “therapeutically effective outcome” means an outcome that is sufficient in a subject suffering from or susceptible to an infection, disease, disorder, and/or condition, to treat, improve symptoms of, diagnose, prevent, and/or delay the onset of the infection, disease, disorder, and/or condition.

[0426] Total daily dose: As used herein, a “total daily dose” is an amount given or prescribed in 24 hr period. It may be administered as a single unit dose.

[0427] Transcription factor: As used herein, the term “transcription factor” refers to a DNA-binding protein that regulates transcription of DNA into RNA, for example, by activation or repression of transcription. Some transcription factors effect regulation of transcription alone, while others act in concert with other proteins. Some transcription factor can both activate and repress transcription under certain conditions. In general, transcription factors bind a specific target sequence or sequences highly similar to a specific consensus sequence in a regulatory region of a target gene. Transcription factors may regulate transcription of a target gene alone or in a complex with other molecules.

[0428] Treating: As used herein, the term “treating” refers to partially or completely alleviating, ameliorating, improving, relieving, delaying onset of, inhibiting progression of, reducing severity of, and/or reducing incidence of one or more symptoms or features of a particular infection, disease, disorder, and/or condition. For example, “treating” cancer may refer to inhibiting survival, growth, and/or spread of a tumor. Treatment may be administered to a subject who does not exhibit signs of a disease, disorder, and/or condition and/or to a subject who exhibits only early signs of a disease, disorder, and/or condition for the purpose of decreasing the risk of developing pathology associated with the disease, disorder, and/or condition.

[0429] Unmodified: As used herein, “unmodified” refers to any substance, compound or molecule prior to being changed in any way. Unmodified may, but does not always, refer to the wild type or native form of a biomolecule or entity. Molecules or entities may undergo a series of modifications whereby each modified product may serve as the “unmodified” starting molecule or entity for a subsequent modification.

### VII. EQUIVALENTS AND SCOPE

[0430] Those skilled in the art will recognize, or be able to ascertain using no more than routine experimentation, many equivalents to the specific embodiments in accordance with the invention described herein. The scope of the present invention is not intended to be limited to the above Description, but rather is as set forth in the appended claims.

[0431] In the claims, articles such as “a,” “an,” and “the” may mean one or more than one unless indicated to the contrary or otherwise evident from the context. Claims or descriptions that include “or” between one or more members of a group are considered satisfied if one, more than one, or all of the group members are present in, employed in, or otherwise relevant to a given product or process unless indicated to the contrary or otherwise evident from the context. The invention includes embodiments in which exactly one member of the group is present in, employed in, or otherwise relevant to a given product or process. The invention includes embodiments in which more than one, or the entire group members are present in, employed in, or otherwise relevant to a given product or process.

[0432] It is also noted that the term “comprising” is intended to be open and permits but does not require the inclusion of additional elements or steps. When the term “comprising” is used herein, the term “consisting of” is thus also encompassed and disclosed.

[0433] Where ranges are given, endpoints are included. Furthermore, it is to be understood that unless otherwise indicated or otherwise evident from the context and understanding of one of ordinary skill in the art, values that are expressed as ranges can assume any specific value or subrange within the stated ranges in different embodiments of the invention, to the tenth of the unit of the lower limit of the range, unless the context clearly dictates otherwise.

[0434] In addition, it is to be understood that any particular embodiment of the present invention that falls within the prior art may be explicitly excluded from any one or more of the claims. Since such embodiments are deemed to be known to one of ordinary skill in the art, they may be excluded even if the exclusion is not set forth explicitly herein. Any particular embodiment of the compositions of the invention (e.g., any nucleic acid or protein encoded thereby; any method of production; any method of use; etc.) can be excluded from any one or more claims, for any reason, whether or not related to the existence of prior art.

[0435] All cited sources, for example, references, publications, databases, database entries, and art cited herein, are incorporated into this application by reference, even if not expressly stated in the citation. In case of conflicting statements of a cited source and the instant application, the statement in the instant application shall control.

[0436] Section and table headings are not intended to be limiting.

### EXAMPLES

### Example 1

### Identification and Selection of Antigens

[0437] In order to identify and select the antigens used in the preparation of the GDA antibodies of the present invention, investigations into the structure-activity relationship of the TGF-beta family was undertaken. The methods used were those described in Shi, M. et al., Latent TGF-βstructure and activation. Nature. 2011 Jun. 15; 474(7351):343-9.

### Structural Analysis of TGF-Beta

[0438] The structure of pro-TGF-beta1 has a ring-like shape. Two prodomain arm domains connect at the elbows to crossed ‘forearms’ formed by the two growth-factor monomers and by prodomain ‘straitjacket’ elements that surround each growth-factor monomer. The centre of the ring contains solvent. The arms come together at the neck, where they are disulphide-linked in a bowtie, and RGD motifs locate to each shoulder. On the opposite side of the ring where the straitjacketed forearms cross, is the site where LTBP links to straitjacket residue Cys 4 of the alpha1 helix.

### Structural Alignment Among TGF-Beta Family Members

[0439] Given the structural insights obtained from crystal structure analysis of TGF-beta1 and the identification of target sites for antibody development, it was of interest to conduct sequence alignments with the other members of the TGF-beta family to identify corresponding targets. The TGF-beta family consists of 33 members. Although growth-factor domains are highly conserved, prodomains vary in length from 169 to 433 residues, and are variously described as unrelated in sequence or low in homology. However, alignment shows that all prodomains have a similar fold. Deeply buried hydrophobic residues in core secondary-structure elements of the arm domain, that is, the α2 helix and β-strands 1-3, 6, 7 and 10, are conserved in all members.

[0440] Most family members also contain clear sequence signatures for the amphipathic C-terminal portion of the α1 helix that inserts intimately between the two growth-factor monomers. A similar insertion in inhibin-α and inhibin-βA has been demonstrated by mapping disruptive mutations to the equivalents of Ile 24 and Leu 28 in TGF-beta. Many family members also contain proline-rich latency lasso loops with lengths that are compatible with encirclement of the growth-factor β-finger. Thus, a prodomain structure similar to that of proTGF-beta, including a portion of the straitjacket, is widespread in the TGF-beta family. However, the low sequence identity and many insertions and deletions indicate substantial specializations.

[0441] Differences in prodomain dimerization among family members are indicated by variations in cysteine positions. The bowtie (β-strands 8 and 9) and its disulphides are specializations. Inhibin-α and -β sub-units have cysteines in similar positions, whereas other family members either have cysteine residues in the β7 strand or lack cysteines altogether in this region.

[0442] The interface between the two arm domains in the β4 and β5 strands is modest in size and lacks hydrophobic and conserved residues. GDF1 and GDF15 specifically lack the β4 and β5 strands, which are adjacent in sequence and structure, on the edge of a β-sheet. Therefore, arm-domain dimerization seems to be variable or absent in some family members.

[0443] The close relatives of TGF-beta, myostatin and GDF11, which are also latent, show conservation of the fastener residues Lys 27 and Tyr 75. Myostatin regulates muscle mass and is stored in the extracellular matrix, bound to LTBP3. Release of myostatin and GDF11 from latency requires cleavage of the prodomain between Arg 75 and Asp 76 by BMP1/tolloid metalloproteinases. This cleavage is between the α2 helix and the fastener. Thus at least two different methods of unfastening the straitjacket, force and proteolysis, can release family members from latency.

[0444] An increasingly large number of TGF-beta family members are recognized to remain associated with their prodomains after secretion, including BMP4, BMP7, BMP10, GDF2, GDF5 and GDF8. Furthermore, many of these prodomains bind with high affinity to fibrillin-1 and fibrillin-2. Targeting by the prodomain to the extra-cellular matrix may be of wide importance in regulating bioactivity in the TGF-beta family. Moreover, binding to LTBPs or fibrillins seems to strengthen the prodomain-growth-factor complex. Thus, although only a limited number of TGF-beta family members are latent as prodomain-growth-factor complexes, the concept of latency may extend to other members when their physiologically relevant complexes with LTBPs and fibrillins are considered.

[0445] The signalling range of BMP4 in vivo is increased by extracellular cleavage of the prodomain by furin-like proteases at a second site upstream of the prodomain-growth-factor cleavage site. Notably, the second site is in the disordered loop bearing the arginine of RGD in TGF-beta1. Loss of the central β10 strand between the two cleavage sites results in loss of binding of the BMP4 prodomain to its growth factor.

[0446] The prodomain of Nodal, which binds to Cripto, targets Nodal for cleavage by proteases secreted by neighbouring cells. AMH is secreted largely uncleaved and association with the prodomain greatly potentiates its activity in vivo. Lefty protein, which is involved in establishing bilateral asymmetry, is not cleaved between the arm and growth-factor domains, and is cleaved instead between the α2 helix and the fastener. Notably, release of the straitjacket should be sufficient to enable access of type II receptors to growth-factor domains.

### Example 2

### Generation of Antibodies for Therapeutic Treatments

### Antibody GDAs Produced by Standard Monoclonal Antibody Generation

[0447] GDAs of the current invention can be antibodies that specifically target TGF-beta family members, their GPCs or other targets. In one embodiment, such antibodies are generated in knockout mice, lacking the gene that encodes for the desired target antigen. Such mice would not be tolerized to the target antigen and therefore would generate antibodies against it that could cross react with human and mouse forms of the antigen. For the production of monoclonal antibodies, host mice are immunized with the target peptide to elicit lymphocytes that specifically bind that peptide. Lymphocytes are collected and fused with an immortalized cell line. The resulting hybridoma cells are cultured in a suitable culture medium with a selection agent to support the growth of only the fused cells.

[0448] Desired hybridoma cell lines are then identified through binding specificity analysis of the secreted antibodies for the target peptide and clones of these cells are subcloned through limiting dilution procedures and grown by standard methods. Antibodies produced by these cells are isolated and purified from the culture medium by standard immunoglobulin purification procedures

### Antibody GDAs Produced Recombinantly

[0449] Recombinant antibody GDAs are produced using the hybridoma cells produced above.

[0450] Heavy and light chain variable region cDNA sequences of the antibody GDA are determined using standard biochemical techniques. Total RNA are extracted from antibody GDA-producing hybridoma cells and converted to cDNA by reverse transcriptase (RT) polymerase chain reaction (PCR). PCR amplification will be carried out on the resulting cDNA using primers specific for amplification of the heavy and light chain sequences. PCR products are then be subcloned into plasmids for sequence analysis. Once sequenced, the antibody GDA coding sequence are placed into an expression vector. For humanization of the antibody produced, coding sequences for human heavy and light chain constant domains are used to substitute for the homologous murine sequences. The resulting construct are transfected into mammalian cells capable of large scale translation of the antibody GDA.

### GDAs Produced by Using Antibody Fragment Display Library Screening Techniques

[0451] GDAs of the present invention may be produced using high throughput methods of discovery. In one embodiment, GDAs comprising synthetic antibodies are designed by screening target antigens using a phage display library. The phage display libraries are composed of millions to billions of phage particles, each expressing a unique Fab antibody fragment on their viral coat. The cDNA encoding each Fab contains the same sequence with the exception of a unique sequence encoding the variable loops of the complementarity determining regions (CDRs). The V_{H} chains of the CDR are expressed as a fusion protein, linked to the N-terminus of the viral pIII coat protein. The V_{L} chain is expressed separately and assembles with the V_{H} chain in the periplasm prior to incorporation of the complex into the viral coat. Target antigens are incubated, in vitro, with members of the phage display library and bound phage particles are precipitated. The cDNA encoding the CDRs of the bound Fab subunits is sequenced from the bound phage. These sequences can be directly incorporated into antibody sequences for recombinant antibody production, or be mutated and utilized for further optimization through in vitro affinity maturation.

### GDAs Produced Using Affinity Maturation Techniques

[0452] Fabs capable of binding target antigens are identified using the libraries described above and high affinity mutants are derived from these through the process of affinity maturation. Affinity maturation technology is used to identify sequences encoding CDRs that have the highest affinity for the target antigen. Using this technology, the CDR sequences isolated using the phage display library selection process described above are mutated randomly as a whole or at specific residues to create a millions to billions of variants. These variants are expressed in Fab antibody fragment fusion proteins in a phage display library and screened for their ability to bind the target antigen. Several rounds of selection, mutation and expression are carried out to identify antibody fragment sequences with the highest affinity for the target antigen. These sequences can be directly incorporated into antibody sequences for recombinant antibody production and incorporation into GDAs.

### Example 3

### In Vivo Testing of GDAs

### Determination of the Efficacy of GDAs in the Treatment of Lung Fibrosis

[0453] GDAs of the present invention are utilized in combination with mouse models of disease to assess their efficacy in the treatment of those diseases. In one such case, GDAs produced to treat lung fibrosis are used to treat mice subjected to bleomycin induced lung injury. Injured as well as sham injured mice are given weekly intraperitoneal injections of a GDA directed against TGF-beta. After 30 days, postmortem lung tissue is collected and assayed for levels of hydroxyproline as an indicator of fibrotic activity. Levels of hydroxyproline are then correlated with GDA dose to determine efficacy.

### Determination of the Ability of GDAs to Alter Bone Density

[0454] GDAs of the present invention are administered to C57B1/6 mice daily by injection. Bone mineral density is then analyzed using a densitometer as described by others (Mohammad, K. S. et al., Pharmacologic inhibition of the TGF-beta type I receptor kinase has anabolic and anti-catabolic effects on bone. PLoS One. 2009; 4(4):e5275) and changes in bone mineral density are assessed as a percentage change in the area scanned.

### Use of GDAs to Treat Human Disease

[0455] GDAs of the present invention may be used in the treatment of human disease. One such disease is Camurati-Engelmann disease (CED). Patients suffering from CED experience symptoms related to overactive TGF-beta signaling. GDAs designed to treat these patients are designed to stabilize the TGF-beta GPC to decrease TGF-beta signaling. Such GDAs may be directed against GPC regions containing a Y52H mutation in patients with CED where the GDA is specifically designed to stabilize the association between the α2-helix and the TGF-beta fingers. GDAs may also be designed to target a pH-regulated salt bridge between Glu 140 and His 193 of the GPC that is disrupted in CED patients due to H193D and E140K mutations. Such a GDA would be designed to stabilize that region and reduce TGF-beta release from the GPC.

### Example 4

### Furin Cleavage Assay

[0456] The present invention includes an assay developed for assaying furin-dependent cleavage of GPCs. This assay is carried out using polyacrylamide gel electrophoresis (PAGE) technology. The assay is useful in determining the level of GPC processing. In the case of TGF-beta, the GPC is synthesized as a precursor polypeptide. Upon dimerization, furin-dependent cleavage occurs converting the dimer to a tightly associated complex of four polypeptides that include a prodomain dimer and growth factor dimer. Samples to be assayed are solubilized and separated by PAGE under reducing or non-reducing conditions (to allow the complexes to remain disulfide-linked). GPC that has not undergone furin-dependent cleavage migrates more slowly than the two cleaved components. Resulting bands of protein can be visualized using standard antibody blotting techniques or through total protein staining and their position on the gel can be correlated with the migration of protein standards to determine the GPC fraction contained in each band. Band density may be determined through densitometric analysis and values can be used to determine the level of GPC processing or overall furin cleavage activity.

### Example 5

### TGF-Beta Reporter Assay

[0457] Transformed mink lung TGF-beta reporter cell (TMLC) lines are cultured in each well of a white, opaque assay plate. TMLC cells comprise a luciferase reporter plasmid that further comprises a luciferase gene controlled by the plasminogen activator inhibitor-1 (PAI-1) gene promoter (Abe, M. et al., An assay for transforming growth factor-beta using cells transfected with a plasminogen activator inhibitor-1 promoter-luciferase construct. Anal Biochem. 1994 Feb. 1; 216(2):276-84). The PAI-1 gene promoter is responsive to TGF-beta-induced cell signaling, leading the TMLC cells to produce luciferase in response to TGF-beta ligand.

[0458] Biological samples to be tested for TGF-beta activity are obtained. In some embodiments, samples comprise tissue homogenates, bodily fluids (including, but not limited to blood, urine and spinal fluid), cell culture medium, buffer and the like. In some embodiments, samples are obtained from patients treated with or without GDAs. In some embodiments, samples are obtained from cells and/or tissues grown or maintained in culture with or without exposure to GDAs or commercially obtained TGF-beta. In some embodiments, samples are obtained from animals treated with or without GDAs.

[0459] Samples including various amounts of diluent are cultured in TMLC culture plates for a period of at least 4 hours. Cell lysates are collected and analyzed for luciferase activity using a Luciferase Assay System (Promega, Madison, Wis.) and Synergy 2 Multi-Mode Microplate Reader (BioTek, Winooski, Vt.) according to the methods described by Wang, et al. (Wang, R. et al., GARP regulates the bioavailability and activation of TGFβ. Mol Biol Cell. 2012 March; 23(6):1129-39). Data are presented as the mean of triplicate samples tested (+/−SEM).

1. A method of modulating a cell signaling event associated with the function of a growth factor comprising contacting a cell with one or more growth factor-directed agents (GDAs).

2. The method according to claim 1, wherein said one or more GDAs is selected from the group consisting of antibodies, fusion proteins, proteins, nucleic acids, small molecules and combinations thereof.

3. The method of claim 2, wherein the GDA is a monoclonal antibody and said monoclonal antibody binds a member selected from the group consisting of a growth factor, a growth factor prodomain complex (GPC), a GPC modulatory factor and an epitope formed by the combination of any of the foregoing.

4. The method of claim 3, wherein said monoclonal antibody is a GPC targeting monoclonal antibody that binds and stabilizes a GPC.

5. The method of claim 4, wherein stabilization results in inhibiting the release of a growth factor from the GPC.

6. A method of increasing the level of free growth factor in a cell niche comprising contacting a GPC with a GPC targeting monoclonal antibody.

7. The method of claim 3, wherein the antibody is a GPC targeting monoclonal antibody.

8. The method of claim 7, wherein modulation comprises upregulation or an increase in the level of a cell signaling molecule.

9. The method of claim 7, wherein modulation comprises downregulation or a decrease in the level of a cell signaling molecule.

10. The method of claim 8, wherein the cell signaling molecule is selected from the group consisting of SEQ ID NOs 74-316.

11. The method of claim 10 wherein the cell signaling molecule is selected from the group consisting of the TGF-beta superfamily of targets selected from the group consisting of SEQ ID NOs 74-111.

12. A method of altering the distribution of TGF-beta polypeptides in a cell or cell niche comprising contacting a GPC of said cell or cell niche with a GDA.

13. The method of claim 12, wherein the GDA comprises a monoclonal antibody.

14. The method of claim 13 wherein said TGF-beta polypeptides are selected from the group consisting of SEQ ID NOs 74-111 and combinations thereof.

15. An isolated monoclonal antibody characterized in that it is specifically immunoreactive with a polypeptide having at least 10 consecutive amino acids of any of the sequences selected from the group consisting of the SEQ ID NOs 1-73.

16. The isolated monoclonal antibody of claim 15 which is human or humanized.

17. The isolated monoclonal antibody of claim 15, wherein said antibody is immunoreactive in the extracellular environment.

18. The isolated monoclonal antibody of claim 15, wherein said antibody is immunoreactive with a GPC that has not undergone furin cleavage.

19. The isolated monoclonal antibody of claim 15, wherein said isolated monoclonal antibody is a stabilizing antibody.

20. The stabilizing antibody of claim 19, wherein said stabilizing antibody inhibits the release of a growth factor from a GPC.

21. The stabilizing antibody of claim 20, wherein said stabilizing antibody inhibits a growth factor signaling pathway.

22. The stabilizing antibody of claim 21, wherein said growth factor signaling pathway is one involving a member of the TGF-beta superfamily selected from the group consisting of SEQ ID NOs 74-111.

23. A composition comprising the isolated monoclonal antibody of claim 15.

24. The composition of claim 23, wherein said composition functions to decrease the concentration of a growth factor in or within a cell or cell niche.

25. The composition of claim 24, wherein said composition reduces the residence time of said growth factor within said cell or cell niche.

26. The composition of claim 23, wherein said composition elicits a neomorphic change within said cell or cell niche.

27. The isolated monoclonal antibody of claim 15, wherein said isolated monclonal antibody is a releasing antibody.

28. The releasing antibody of claim 27, wherein said releasing antibody promotes the release of a growth factor from a GPC.

29. The releasing antibody of claim 28, wherein said growth factor is a TGF-beta superfamily member selected from the group consisting of SEQ ID NOs 74-111.

30. The releasing antibody of claim 28, wherein said releasing antibody promotes a growth factor signaling pathway.

31. The releasing antibody of claim 28, wherein said releasing antibody increases the concentration of said growth factor within a cell or cell niche.

32. The releasing antibody of claim 28, wherein said releasing antibody increases the residence time of said growth factor within said cell or cell niche.

33. The releasing antibody of claim 28, wherein said releasing antibody elicits a neomorphic change within said cell or cell niche.

34. The composition of claim 23, wherein said composition promotes the clearance of a GPC by phagocytosis or pinocytosis.

35. A monoclonal antibody obtained by a method comprising the steps of:
a. contacting a mammal with at least one peptide, wherein the peptide is at least 70% identical to the sequences selected from the group consisting of the SEQ ID NOs 1-73;
b. collecting cells producing the antibody from the mammal; and
c. immortalizing the cells obtained in step (b) thereby creating a hybridoma expressing the monoclonal antibodies.

36. A method for preparing a polypeptide encoding a GPC targeting antibody comprising:
a. obtaining a host cell;
b. incubating the host cell in culture under conditions to promote expression of the polypeptide encoding a GPC targeting antibody; and
c. purifying the expressed antibody from the host cell.

37. A pharmaceutical composition comprising as an active ingredient a monoclonal antibody specific to a GPC or component or an antibody fragment thereof comprising at least an antigen-binding portion, wherein said antibody recognizes an antigenic determinant epitope selected from the group consisting of the SEQ ID NOs 1-73 and a pharmaceutically acceptable carrier.

38. A method of treating a subject suffering from a disorder or disease associated with aberrant GPC signaling comprising;
a. administering to said subject in need thereof an antibody specific to a GPC wherein said antibody comprises an antigen-binding-portion and wherein said antibody recognizes an antigenic determinant epitope selected from the group consisting of the SEQ ID NOs 1-73.

39. A kit or assay comprising the monoclonal antibody of claim 15 and instructions for use thereof.

40. The method of claim 9, wherein the cell signaling molecule is selected from the group consisting of SEQ ID NOs 74-316.

41. The method of claim 40 wherein the cell signaling molecule is selected from the group consisting of the TGF-beta superfamily of targets selected from the group consisting of SEQ ID NOs 74-111.

42. A GDA that binds glycoprotein-A repetitions predominant protein (GARP) when GARP is complexed with a GPC.

43. The GDA of claim 42, wherein said GDA prevents the dissociation of growth factor from said growth factor prodomain complex.

44. The GDA of claim 43, wherein said GPC comprises TGF-β1 growth factor complexed with TGF-β1 prodomain.

45. The GDA of any of claim 44, wherein said GDA comprises an antibody or antibody fragment.

46. The antibody or antibody fragment of claim 45, wherein said antibody or antibody fragment inhibits TGF-β activity.

The application's sequence listing, which the Patent Office published only in electronic form, follows.

SEQUENCE LISTING (319 sequences)

SEQ ID NO: 1 - protein, 361 aa, Homo sapiens
LSTCKTIDMELVKRKRIEAIRGQILSKLRLASPPSQGEVPPGPLPEAVLALYNSTRDRVAGESAEPEPEPEADYYAKEVTRVLMVETHNEIYDKFKQSTHSIYMFFNTSELREAVPEPVLLSRAELRLLRLKLKVEQHVELYQKYSNNSWRYLSNRLLAPSDSPEWLSFDVTGVVRQWLSRGGEIEGFRLSAHCSCDSRDNTLQVDINGFTTGRRGDLATIHGMNRPFLLLMATPLERAQHLQSSRHRRALDTNYCFSSTEKNCCVRQLYIDFRKDLGWKWIHEPKGYHANFCLGPCPYIWSLDTQYSKVLALYNQHNPGASAAPCCVPQALEPLPIVYYVGRKPKVEQLSNMIVRSCKCS

SEQ ID NO: 2 - protein, 395 aa, Homo sapiens
SLSTCSTLDMDQFMRKRIEAIRGQILSKLKLTSPPEDYPEPEEVPPEVISIYNSTRDLLQEKASRRAAACERERSDEEYYAKEVYKIDMPPFFPSENAIPPTFYRPYFRIVRFDVSAMEKNASNLVKAEFRVFRLQNPKARVPEQRIELYQILKSKDLTSPTQRYIDSKVVKTRAEGEWLSFDVTDAVHEWLHHKDRNLGFKISLHCPCCTFVPSNNYIIPNKSEELEARFAGIDGTSTYTSGDQKTIKSTRKKNSGKTPHLLLMLLPSYRLESQQTNRRKKRALDAAYCFRNVQDNCCLRPLYIDFKRDLGWKWIHEPKGYNANFCAGACPYLWSSDTQHSRVLSLYNTINPEASASPCCVSQDLEPLTILYYIGKTPKIEQLSNMIVKSCKCS

SEQ ID NO: 3 - protein, 392 aa, Homo sapiens
SLSLSTCTTLDFGHIKKKRVEAIRGQILSKLRLTSPPEPTVMTHVPYQVLALYNSTRELLEEMHGEREEGCTQENTESEYYAKEIHKFDMIQGLAEHNELAVCPKGITSKVFRFNVSSVEKNRTNLFRAEFRVLRVPNPSSKRNEQRIELFQILRPDEHIAKQRYIGGKNLPTRGTAEWLSFDVTDTVREWLLRRESNLGLEISIHCPCHTFQPNGDILENIHEVMEIKFKGVDNEDDHGRGDLGRLKKQKDHHNPHLILMMIPPHRLDNPGQGGQRKKRALDTNYCFRNLEENCCVRPLYIDFRQDLGWKWVHEPKGYYANFCSGPCPYLRSADTTHSTVLGLYNTLNPEASASPCCVPQDLEPLTILYYVGRTPKVEQLSNMVVKSCKCS

SEQ ID NO: 4 - protein, 383 aa, Homo sapiens
AEGPAAAAAAAAAAAAAGVGGERSSRPAPSVAPEPDGCPVCVWRQHSRELRLESIKSQILSKLRLKEAPNISREVVKQLLPKAPPLQQILDLHDFQGDALQPEDFLEEDEYHATTETVISMAQETDPAVQTDGSPLCCHFHFSPKVMFTKVLKAQLWVYLRPVPRPATVYLQILRLKPLTGEGTAGGGGGGRRHIRIRSLKIELHSRSGHWQSIDFKQVLHSWFRQPQSNWGIEINAFDPSGTDLAVTSLGPGAEGLHPFMELRVLENTKRSRRNLGLDCDEHSSESRCCRYPLTVDFEAFGWDWIIAPKRYKANYCSGQCEYMFMQKYPHTHLVQQANPRGSAGPCCTPTKMSPINMLYFNDKQQIIYGKIPGMVVDRCGCS

SEQ ID NO: 5 - protein, 352 aa, Homo sapiens [sequence omitted]

SEQ ID NO: 6 - protein, 406 aa, Homo sapiens
SPTPGSEGHSAAPDCPSCALAALPKDVPNSQPEMVEAVKKHILNMLHLKKRPDVTQPVPKAALLNAIRKLHVGKVGENGYVEIEDDIGRRAEMNELMEQTSEIITFAESGTARKTLHFEISKEGSDLSVVERAEVWLFLKVPKANRTRTKVTIRLFQQQKHPQGSLDTGEEAEEVGLKGERSELLLSEKVVDARKSTWHVFPVSSSIQRLLDQGKSSLDVRIACEQCQESGASLVLLGKKKKKEEEGEGKKKGGGEGGAGADEEKEQSHRPFLMLQARQSEDHPHRRRRRGLECDGKVNICCKKQFFVSFKDIGWNDWIIAPSGYHANYCEGECPSHIAGTSGSSLSFHSTVINHYRMRGHSPFANLKSCCVPTKLRPMSMLYYDDGQNIIKKDIQNMIVEECGCS

SEQ ID NO: 7 - protein, 379 aa, Homo sapiens
SPTPPPTPAAPPPPPPPGSPGGSQDTCTSCGGFRRPEELGRVDGDFLEAVKRHILSRLQMRGRPNITHAVPKAAMVTALRKLHAGKVREDGRVEIPHLDGHASPGADGQERVSEIISFAETDGLASSRVRLYFFISNEGNQNLFVVQASLWLYLKLLPYVLEKGSRRKVRVKVYFQEQGHGDRWNMVEKRVDLKRSGWHTFPLTEAIQALFERGERRLNLDVQCDSCQELAVVPVFVDPGEESHRPFVVVQARLGDSRHRIRKRGLECDGRTNLCCRQQFFIDFRLIGWNDWIIAPTGYYGNYCEGSCPAYLAGVPGSASSFHTAVVNQYRMRGLNPGTVNSCCIPTKLSTMSMLYFDDEYNIVKRDVPNMIVEECGCA

SEQ ID NO: 8 - protein, 334 aa, Homo sapiens
TPRAGGQCPACGGPTLELESQRELLLDLAKRSILDKLHLTQRPTLNRPVSRAALRTALQHLHGVPQGALLEDNREQECEIISFAETGLSTINQTRLDFHFSSDRTAGDREVQQASLMFFVQLPSNTTWTLKVRVLVLGPHNTNLTLATQYLLEVDASGWHQLPLGPEAQAACSQGHLTLELVLEGQVAQSSVILGGAAHRPFVAARVRVGGKHQIHRRGIDCQGGSRMCCRQEFFVDFREIGWHDWIIQPEGYAMNFCIGQCPLHIAGMPGIAASFHTAVLNLLKANTAAGTTGGGSCCVPTARRPLSLLYYDRDSNIVKTDIPDMVVEACGCS

SEQ ID NO: 9 - protein, 331 aa, Homo sapiens
QGTGSVCPSCGGSKLAPQAERALVLELAKQQILDGLHLTSRPRITHPPPQAALTRALRRLQPGSVAPGNGEEVISFATVTDSTSAYSSLLTFHLSTPRSHHLYHARLWLHVLPTLPGTLCLRIFRWGPRRRRQGSRTLLAEHHITNLGWHTLTLPSSGLRGEKSGVLKLQLDCRPLEGNSTVTGQPRRLLDTAGHQQPFLELKIRANEPGAGRARRRTPTCEPATPLCCRRDHYVDFQELGWRDWILQPEGYQLNYCSGQCPPHLAGSPGIAASFHSAVFSLLKANNPWPASTSCCVPTARRPLSLLYLDHNGNVVKTDVPDMVVEACGCS

SEQ ID NO: 10 - protein, 345 aa, Homo sapiens
LTGEQLLGSLLRQLQLKEVPTLDRADMEELVIPTHVRAQYVALLQRSHGDRSRGKRFSQSFREVAGRFLALEASTHLLVFGMEQRLPPNSELVQAVLRLFQEPVPKAALHRHGRLSPRSARARVTVEWLRVRDDGSNRTSLIDSRLVSVHESGWKAFDVTEAVNFWQQLSRPRQPLLLQVSVQREHLGPLASGAHKLVRFASQGAPAGLGEPQLELHTLDLGDYGAQGDCDPEAPMTEGTRCCRQEMYIDLQGMKWAENWVLEPPGFLAYECVGTCRQPPEALAFKWPFLGPRQCIASETDSLPMIVSIKEGGRTRPQVVSLPNMRVQKCSCASDGALVPRRLQP

SEQ ID NO: 11 - protein, 345 aa, Homo sapiens
LTEEQLLGSLLRQLQLSEVPVLDRADMEKLVIPAHVRAQYVVLLRRSHGDRSRGKRFSQSFREVAGRFLASEASTHLLVFGMEQRLPPNSELVQAVLRLFQEPVPKAALHRHGRLSPRSAQARVTVEWLRVRDDGSNRTSLIDSRLVSVHESGWKAFDVTEAVNFWQQLSRPRQPLLLQVSVQREHLGPLASGAHKLVRFASQGAPAGLGEPQLELHTLDLRDYGAQGDCDPEAPMTEGTRCCRQEMYIDLQGMKWAKNWVLEPPGFLAYECVGTCQQPPEALAFNWPFLGPRQCIASETASLPMIVSIKEGGRTRPQVVSLPNMRVQKCSCASDGALVPRRLQP

SEQ ID NO: 12 - protein, 279 aa, Homo sapiens
LSLAEASRASFPGPSELHSEDSRFRELRKRYEDLLTRLRANQSWEDSNTDLVPAPAVRILTPEVRLGSGGHLHLRISRAALPEGLPEASRLHRALFRLSPTASRSWDVTRPLRRQLSLARPQAPALHLRLSPPPSQSDQLLAESSSARPQLELHLRPQAARGRRRARARNGDHCPLGPGRCCRLHTVRASLEDLGWADWVLSPREVQVTMCIGACPSQFRAANMHAQIKTSLHRLKPDTVPAPCCVPASYNPMVLIQKTDTGVSLQTYDDLLAKDCHCI

SEQ ID NO: 13 - protein, 542 aa, Homo sapiens
LLGTEALRAEEPAVGTSGLIFREDLDWPPGIPQEPLCLVALGGDSNGSSSPLRVVGALSAYEQAFLGAVQRARWGPRDLATFGVCNTGDRQAALPSLRRLGAWLRDPGGQRLVVLHLEEVTWEPTPSLRFQEPPPGGAGPPELALLVLYPGPGPEVTVTRAGLPGAQSLCPSRDTRYLVLAVDRPAGAWRGSGLALTLQPRGEDSRLSTARLQALLFGDDHRCFTRMTPALLLLPRSEPAPLPAHGQLDTVPFPPPRPSAELEESPPSADPFLETLTRLVRALRVPPARASAPRLALDPDALAGFPQGLVNLSDPAALERLLDGEEPLLLLLRPTAATTGDPAPLHDPTSAPWATALARRVAAELQAAAAELRSLPGLPPATAPLLARLLALCPGGPGGLGDPLRALLLLKALQGLRVEWRGRDPRGPGRAQRSAGATAADGPCALRELSVDLRAERSVLIPETYQANNCQGVCGWPQSDRNPRYGNHVVLLLKMQVRGAALARPPCCVPTAYAGKLLISLSEERISAHHVPNMVATECGCR

SEQ ID NO: 14 - protein, 348 aa, Homo sapiens
CQGLELARELVLAKVRALFLDALGPPAVTREGGDPGVRRLPRRHALGGFTHRGSEPEEEEDVSQAILFPATDASCEDKSAARGLAQEAEEGLFRYMFRPSQHTRSRQVTSAQLWFHTGLDRQGTAASNSSEPLLGLLALSPGGPVAVPMSLGHAPPHWAVLHLATSALSLLTHPVLVLLLRCPLCTCSARPEATPFLVAHTRTRPPSGGERARRSTPLMSWPWSPSALRLLQRPPEEPAAHANCHRVALNISFQELGWERWIVYPPSFIFHYCHGGCGLHIPPNLSLPVPGAPPTPAQPYSLLPGAQPCCAALPGTMRPLHVRTTSDGGYSFKYETVPNLLTQHCACI

SEQ ID NO: 15 - protein, 343 aa, Homo sapiens
PVPPGPAAALLQALGLRDEPQGAPRLRPVPPVMWRLFRRRDPQETRSGSRRTSPGVTLQPCHVEELGVAGNIVRHIPDRGAPTRASEPASAAGHCPEWTVVFDLSAVEPAERPSRARLELRFAAAAAAAPEGGWELSVAQAGQGAGADPGPVLLRQLVPALGPPVRAELLGAAWARNASWPRSLRLALALRPRAPAACARLAEASLLLVTLDPRLCHPLARPRRDAEPVLGGGPGGACRARRLYVSFREVGWHRWVIAPRGFLANYCQGQCALPVALSGSGGPPALNHAVLRALMHAAAPGAADLPCCVPARLSPISVLFFDNSDNVVLRQYEDMVVDECGCR

SEQ ID NO: 16 - protein, 340 aa, Homo sapiens
QEYVFLQFLGLDKAPSPQKFQPVPYILKKIFQDREAAATTGVSRDLCYVKELGVRGNVLRFLPDQGFFLYPKKISQASSCLQKLLYFNLSAIKEREQLTLAQLGLDLGPNSYYNLGPELELALFLVQEPHVWGQTTPKPGKMFVLRSVPWPQGAVHFNLLDVAKDWNDNPRKNFGLFLEILVKEDRDSGVNFQPEDTCARLRCSLHASLLVVTLNPDQCHPSRKRRAAIPVPKLSCKNLCHRHQLFINFRDLGWHKWIIAPKGFMANYCHGECPFSLTISLNSSNYAFMQALMHAVDPEIPQAVCIPTKLSPISMLYQDNNDNVILRHYEDMVVDECGCG

SEQ ID NO: 17 - protein, 474 aa, Homo sapiens
APDLGQRPQGTRPGLAKAEAKERPPLARNVFRPGGHSYGGGATNANARAKGGTGQTGGLTQPKKDEPKKLPPRPGGPEPKPGHPPQTRQATARTVTPKGQLPGGKAPPKAGSVPSSFLLKKAREPGPPREPKEPFRPPPITPHEYMLSLYRTLSDADRKGGNSSVKLEAGLANTITSFIDKGQDDRGPVVRKQRYVFDISALEKDGLLGAELRILRKKPSDTAKPAAPGGGRAAQLKLSSCPSGRQPASLLDVRSVPGLDGSGWEVFDIWKLFRNFKNSAQLCLELEAWERGRAVDLRGLGFDRAARQVHEKALFLVFGRTKKRDLFFNEIKARSGQDDKTVYEYLFSQRRKRRAPLATRQGKRPSKNLKARCSRKALHVNFKDMGWDDWIIAPLEYEAFHCEGLCEFPLRSHLEPTNHAVIQTLMNSMDPESTPPTCCVPTRLSPISILFIDSANNVVYKQYEDMVVESCGCR

SEQ ID NO: 18 - protein, 433 aa, Homo sapiens
FQQASISSSSSSAELGSTKGMRSRKEGKMQRAPRDSDAGREGQEPQPRPQDEPRAQQPRAQEPPGRGPRVVPHEYMLSIYRTYSIAEKLGINASFFQSSKSANTITSFVDRGLDDLSHTPLRRQKYLFDVSMLSDKEELVGAELRLFRQAPSAPWGPPAGPLHVQLFPCLSPLLLDARTLDPQGAPPAGWEVFDVWQGLRHQPWKQLCLELRAAWGELDAGEAEARARGPQQPPPPDLRSLGFGRRVRPPQERALLVVFTRSQRKNLFAEMREQLGSAEAAGPGAGAEGSWPPPSGAPDARPWLPSPGRRRRRTAFASRHGKRHGKKSRLRCSKKPLHVNFKELGWDDWIIAPLEYEAYHCEGVCDFPLRSHLEPTNHAIIQTLMNSMDPGSTPPSCCVPTKLTPISILYIDAGNNVVYKQYEDMVVESCGCR

SEQ ID NO: 19 - protein, 431 aa, Homo sapiens
RDGLEAAAVLRAAGAGPVRSPGGGGGGGGGGRTLAQAAGAAAVPAAAVPRARAARRAAGSGFRNGSVVPHHFMMSLYRSLAGRAPAGAAAVSASGHGRADTITGFTDQATQDESAAETGQSFLFDVSSLNDADEVVGAELRVLRRGSPESGPGSWTSPPLLLLSTCPGAARAPRLLYSRAAEPLVGQRWEAFDVADAMRRHRREPRPPRAFCLLLRAVAGPVPSPLALRRLGFGWPGGGGSAAEERAVLVVSSRTQRKESLFREIRAQARALGAALASEPLPDPGTGTASPRAVIGGRRRRRTALAGTRTAQGSGGGAGRGHGRRGRSRCSRKPLHVDFKELGWDDWIIAPLDYEAYHCEGLCDFPLRSHLEPTNHAIIQTLLNSMAPDAAPASCCVPARLSPISILYIDAANNVVYKQYEDMVVEACGCR

SEQ ID NO: 20 - protein, 403 aa, Homo sapiens
SPIMNLEQSPLEEDMSLFGDVFSEQDGVDFNTLLQSMKDEFLKTLNLSDIPTQDSAKVDPPEYMLELYNKFATDRTSMPSANIIRSFKNEDLFSQPVSFNGLRKYPLLFNVSIPHHEEVIMAELRLYTLVQRDRMIYDGVDRKITIFEVLESKGDNEGERNMLVLVSGEIYGTNSEWETFDVTDAIRRWQKSGSSTHQLEVHIESKHDEAEDASSGRLEIDTSAQNKHNPLLIVFSDDQSSDKERKEELNEMISHEQLPELDNLGLDSFSSGPGEEALLQMRSNIIYDSTARIRRNAKGNYCKRTPLYIDFKEIGWDSWIIAPPGYEAYECRGVCNYPLAEHLTPTKHAIIQALVHLKNSQKASKACCVPTKLEPISILYLDKGVVTYKFKYEGMAVSECGCR

SEQ ID NO: 21 - protein, 407 aa, Homo sapiens
KPLQSWGRGSAGGNAHSPLGVPGGGLPEHTFNLKMFLENVKVDFLRSLNLSGVPSQDKTRVEPPQYMIDLYNRYTSDKSTTPASNIVRSFSMEDAISITATEDFPFQKHILLFNISIPRHEQITRAELRLYVSCQNHVDPSHDLKGSVVIYDVLDGTDAWDSATETKTFLVSQDIQDEGWETLEVSSAVKRWVRSDSTKSKNKLEVTVESHRKGCDTLDISVPPGSRNLPFFVVFSNDHSSGTKETRLELREMISHEQESVLKKLSKDGSTEAGESSHEEDTDGHVAAGSTLARRKRSAGAGSHCQKTSLRVNFEDIGWDSWIIAPKEYEAYECKGGCFFPLADDVTPTKHAIVQTLVHLKFPTKVGKACCVPTKLSPISVLYKDDMGVPTLKYHYEGMSVAECGCR

SEQ ID NO: 22 - protein, 325 aa, Homo sapiens
TVATALLRTRGQPSSPSPLAYMLSLYRDPLPRADIIRSLQAEDVAVDGQNWTFAFDFSFLSQQEDLAWAELRLQLSSPVDLPTEGSLAIEIFHQPKPDTEQASDSCLERFQMDLFTVTLSQVTFSLGSMVLEVTRPLSKWLKRPGALEKQMSRVAGECWPRPPTPPATNVLLMLYSNLSQEQRQLGGSTLLWEAESSWRAQEGQLSWEWGKRHRRHHLPDRSQLCRKVKFQVDFNLIGWGSWIIYPKQYNAYRCEGECPNPVGEEFHPTNHAYIQSLLKRYQPHRVPSTCCAPVKTKPLSMLYVDNGRVLLDHHKDMIVEECGCL

SEQ ID NO: 23 - protein, 373 aa, Homo sapiens
LVPELGRRKFAAASSGRPSSQPSDEVLSEFELRLLSMFGLKQRPTPSRDAVVPPYMLDLYRRHSGQPGSPAPDHRLERAASRANTVRSFHHEESLEELPETSGKTTRRFFFNLSSIPTEEFITSAELQVFREQMQDALGNNSSFHHRINIYEIIKPATANSKFPVTRLLDTRLVNQNASRWESFDVTPAVMRWTAQGHANHGFVVEVAHLEEKQGVSKRHVRISRSLHQDEHSWSQIRPLLVTFGHDGKGHPLHKREKRQAKHKQRKRLKSSCKRHPLYVDFSDVGWNDWIVAPPGYHAFYCHGECPFPLADHLNSTNHAIVQTLVNSVNSKIPKACCVPTELSAISMLYLDENEKVVLKNYQDMVVEGCGCR

SEQ ID NO: 24 - protein, 389 aa, Homo sapiens
GASHASLIPETGKKKVAEIQGHAGGRRSGQSHELLRDFEATLLQMFGLRRRPQPSKSAVIPDYMRDLYRLQSGEEEEEQIHSTGLEYPERPASRANTVRSFHHEEHLENIPGTSENSAFRFLFNLSSIPENEVISSAELRLFREQVDQGPDWERGFHRINIYEVMKPPAEVVPGHLITRLLDTRLVHHNVTRWETFDVSPAVLRWTREKQPNYGLAIEVTHLHQTRTHQGQHVRISRSLPQGSGNWAQLRPLLVTFGHDGRGHALTRRRRAKRSPKHHSQRARKKNKNCRRHSLYVDFSDVGWNDWIVAPPGYQAFYCHGDCPFPLADHLNSTNHAIVQTLVNSVNSSIPKACCVPTELSAISMLYLDEYDKVVLKNYQEMVVEGCGCR

SEQ ID NO: 25 - protein, 424 aa, Homo sapiens
DNHVHSSFIYRRLRNHERREIQREILSILGLPHRPRPFSPGKQASSAPLFMLDLYNAMTNEENPEESEYSVRASLAEETRGARKGYPASPNGYPRRIQLSRTTPLTTQSPPLASLHDTNFLNDADMVMSFVNLVERDKDFSHQRRHYKEFRFDLTQIPHGEAVTAAEFRIYKDRSNNRFENETIKISIYQIIKEYTNRDADLFLLDTRKAQALDVGWLVFDITVTSNHWVINPQNNLGLQLCAETGDGRSINVKSAGLVGRQGPQSKQPFMVAFFKASEVLLRSVRAANKRKNQNRNKSSSHQDSSRMSSVGDYNTSEQKQACKKHELYVSFRDLGWQDWIIAPEGYAAFYCDGECSFPLNAHMNATNHAIVQTLVHLMFPDHVPKPCCAPTKLNAISVLYFDDSSNVILKKYRNMVVRSCGCH

SEQ ID NO: 26 - protein, 493 aa, Homo sapiens
CCGPPPLRPPLPAAAAAAAGGQLLGDGGSPGRTEQPPPSPQSSSGFLYRRLKTQEKREMQKEILSVLGLPHRPRPLHGLQQPQPPALRQQEEQQQQQQLPRGEPPPGRLKSAPLFMLDLYNALSADNDEDGASEGERQQSWPHEAASSSQRRQPPPGAAHPLNRKSLLAPGSGSGGASPLTSAQDSAFLNDADMVMSFVNLVEYDKEFSPRQRHHKEFKFNLSQIPEGEVVTAAEFRIYKDCVMGSFKNQTFLISIYQVLQEHQHRDSDLFLLDTRVVWASEEGWLEFDITATSNLWVVTPQHNMGLQLSVVTRDGVHVHPRAAGLVGRDGPYDKQPFMVAFFKVSEVHVRTTRSASSRRRQQSRNRSTQSQDVARVSSASDYNSSELKTACRKHELYVSFQDLGWQDWIIAPKGYAANYCDGECSFPLNAHMNATNHAIVQTLVHLMNPEYVPKPCCAPTKLNAISVLYFDDNSNVILKKYRNMVVRACGCH

SEQ ID NO: 27 - protein, 402 aa, Homo sapiens
DFSLDNEVHSSFIHRRLRSQERREMQREILSILGLPHRPRPHLQGKHNSAPMFMLDLYNAMAVEEGGGPGGQGFSYPYKAVFSTQGPPLASLQDSHFLTDADMVMSFVNLVEHDKEFFHPRYHHREFRFDLSKIPEGEAVTAAEFRIYKDYIRERFDNETFRISVYQVLQEHLGRESDLFLLDSRTLWASEEGWLVFDITATSNHWVVNPRHNLGLQLSVETLDGQSINPKLAGLIGRHGPQNKQPFMVAFFKATEVHFRSIRSTGSKQRSQNRSKTPKNQEALRMANVAENSSSDQRQACKKHELYVSFRDLGWQDWIIAPEGYAAYYCEGECAFPLNSYMNATNHAIVQTLVHFINPETVPKPCCAPTQLNAISVLYFDDSSNVILKKYRNMVVRACGCH

SEQ ID NO: 28 - protein, 383 aa, Homo sapiens
GGGPGLRPPPGCPQRRLGARERRDVQREILAVLGLPGRPRPRAPPAASRLPASAPLFMLDLYHAMAGDDDEDGAPAEQRLGRADLVMSFVNMVERDRALGHQEPHWKEFRFDLTQIPAGEAVTAAEFRIYKVPSIHLLNRTLHVSMFQVVQEQSNRESDLFFLDLQTLRAGDEGWLVLDVTAASDCWLLKRHKDLGLRLYVETEDGHSVDPGLAGLLGQRAPRSQQPFVVTFFRASPSPIRTPRAVRPLRRRQPKKSNELPQANRLPGIFDDVRGSHGRQVCRRHELYVSFQDLGWLDWVIAPQGYSAYYCEGECSFPLDSCMNATNHAILQSLVHLMKPNAVPKACCAPTKLSATSVLYYDSSNNVILRKHRNMVVKACGCH

SEQ ID NO: 29 - protein, 383 aa, Homo sapiens
GGGPGLRPPPGCPQRRLGARERRDVQREILAVLGLPGRPRPRAPPAASRLPASAPLFMLDLYHAMAGDDDEDGAPAERRLGRADLVMSFVNMVERDRALGHQEPHWKEFRFDLTQIPAGEAVTAAEFRIYKVPSIHLLNRTLHVSMFQVVQEQSNRESDLFFLDLQTLRAGDEGWLVLDVTAASDCWLLKRHKDLGLRLYVETEDGHSVDPGLAGLLGQRAPRSQQPFVVTFFRASPSPIRTPRAVRPLRRRQPKKSNELPQANRLPGIFDDVHGSHGRQVCRRHELYVSFQDLGWLDWVIAPQGYSAYYCEGECSFPLDSCMNATNHAILQSLVHLMMPDAVPKACCAPTKLSATSVLYYDSSNNVILRKHRNMVVKACGCH

SEQ ID NO: 30 - protein, 374 aa, Homo sapiens
MEHRAQMAEGGQSSIALLAEAPTLPLIEELLEESPGEQPRKPRLLGHSLRYMLELYRRSADSHGHPRENRTIGATMVRLVKPLTSVARPHRGTWHIQILGFPLRPNRGLYQLVRATVVYRHHLQLTRFNLSCHVEPWVQKNPTNHFPSSEGDSSKPSLMSNAWKEMDITQLVQQRFWNNKGHRILRLRFMCQQQKDSGGLELWHGTSSLDIAFLLLYFNDTHKSIRKAKFLPRGMEEFMERESLLRRTRQADGISAEVTASSSKHSGPENNQCSLHPFQISFRQLGWDHWIIAPPFYTPNYCKGTCLRVLRDGLNSPNHAIIQNLINQLVDQSVPRPSCVPYKYVPISVLMIEANGSILYKEYEGMIAESCTCR

SEQ ID NO: 31 - protein, 430 aa, Homo sapiens
SQASGGEAQIAASAELESGAMPWSLLQHIDERDRAGLLPALFKVLSVGRGGSPRLQPDSRALHYMKKLYKTYATKEGIPKSNRSHLYNTVRLFTPCTRHKQAPGDQVTGILPSVELLFNLDRITTVEHLLKSVLLYNINNSVSFSSAVKCVCNLMIKEPKSSSRTLGRAPYSFTFNSQFEFGKKHKWIQIDVTSLLQPLVASNKRSIHMSINFTCMKDQLEHPSAQNGLFNMTLVSPSLILYLNDTSAQAYHSWYSLHYKRRPSQGPDQERSLSAYPVGEEAAEDGRSSHHRHRRGQETVSSELKKPLGPASFNLSEYFRQFLLPQNECELHDFRLSFSQLKWDNWIVAPHRYNPRYCKGDCPRAVGHRYGSPVHTMVQNIIYEKLDSSVPRPSCVPAKYSPLSVLTIEPDGSIAYKEYEDMIATKCTCR

SEQ ID NO: 32 - protein, 450 aa, Homo sapiens
ERPKPPFPELRKAVPGDRTAGGGPDSELQPQDKVSEHMLRLYDRYSTVQAARTPGSLEGGSQPWRPRLLREGNTVRSFRAAAAETLERKGLYIFNLTSLTKSENILSATLYFCIGELGNISLSCPVSGGCSHHAQRKHIQIDLSAWTLKFSRNQSQLLGHLSVDMAKSHRDIMSWLSKDITQLLRKAKENEEFLIGFNITSKGRQLPKRRLPFPEPYILVYANDAAISEPESVVSSLQGHRNFPTGTVPKWDSHIRAALSIERRKKRSTGVLLPLQNNELPGAEYQYKKDEVWEERKPYKTLQAQAPEKSKNKKKQRKGPHRKSQTLQFDEQTLKKARRKQWIEPRNCARRYLKVDFADIGWSEWIISPKSFDAYYCSGACQFPMPKSLKPSNHATIQSIVRAVGVVPGIPEPCCVPEKMSSLSILFFDENKNVVLKVYPNMTVESCACR

SEQ ID NO: 33 - protein, 445 aa, Homo sapiens
SHRAPAWSALPAAADGLQGDRDLQRHPGDAAATLGPSAQDMVAVHMHRLYEKYSRQGARPGGGNTVRSFRARLEVVDQKAVYFFNLTSMQDSEMILTATFHFYSEPPRWPRALEVLCKPRAKNASGRPLPLGPPTRQHLLFRSLSQNTATQGLLRGAMALAPPPRGLWQAKDISPIVKAARRDGELLLSAQLDSEERDPGVPRPSPYAPYILVYANDLAISEPNSVAVTLQRYDPFPAGDPEPRAAPNNSADPRVRRAAQATGPLQDNELPGLDERPPRAHAQHFHKHQLWPSPFRALKPRPGRKDRRKKGQEVFMAASQVLDFDEKTMQKARRKQWDEPRVCSRRYLKVDFADIGWNEWIISPKSFDAYYCAGACEFPMPKIVRPSNHATIQSIVRAVGIIPGIPEPCCVPDKMNSLGVLFLDENRNVVLKVYPNMSVDTCACR

SEQ ID NO: 34 - protein, 192 aa, Homo sapiens
FPLPAGKRPPEAPAEDRSLGRRRAPFALSSDSNMPEDYPDQFDDVMDFIQATIKRLKRSPDKQMAVLPRRERNRQAAAANPENSRGKGRRGQRGKNRGCVLTAIHLNVTDLGLGYETKEELIFRYCSGSCDAAETTYDKILKNLSRNRRLVSDKVGQACCRPIAFDDDLSFLDDNLVYHILRKHSAKRCGCI

SEQ ID NO: 35 - protein, 178 aa, Homo sapiens
IWMCREGLLLSHRLGPALVPLHRLPRTLDARIARLAQYRALLQGAPDAMELRELTPWAGRPPGPRRRAGPRRRRARARLGARPCGLRELEVRVSELGLGYASDETVLFRYCAGACEAAARVYDLGLRRLRQRRRLRRERVRAQPCCRPTAYEDEVSFLDAHSRYHTVHELSARECACV

SEQ ID NO: 36 - protein, 135 aa, Homo sapiens
WGPDARGVPVADGEFSSEQVAKAGGTWLGTHRPLARLRRALSGPCQLWSLTLSVAELGLGYASEEKVIFRYCAGSCPRGARTQHGLALARLQGQGRAHGGPCCRPTRYTDVAFLDDRHRWQRLPQLSAAACGCGG

SEQ ID NO: 37 - protein, 181 aa, Homo sapiens
SLGSAPRSPAPREGPPPVLASPAGHLPGGRTARWCSGRARRPPPQPSRPAPPPPAPPSALPRGGRAARAGGPGSRARAAGARGCRLRSQLVPVRALGLGHRSDELVRFRFCSGSCRRARSPHDLSLASLLGAGALRPPPGSRPVSQPCCRPTRYEAVSFMDVNSTWRTVDRLSATACGCLG

SEQ ID NO: 38 - protein, 30 aa, Homo sapiens
LSTCKTIDMELVKRKRIEAIRGQILSKLRL

SEQ ID NO: 39 - protein, 30 aa, Homo sapiens
LSTCSTLDMDQFMRKRIEAIRGQILSKLKL

SEQ ID NO: 40 - protein, 30 aa, Homo sapiens
LSTCTTLDFGHIKKKRVEAIRGQILSKLRL

SEQ ID NO: 41 - protein, 30 aa, Homo sapiens
DGCPVCVWRQHSRELRLESIKSQILSKLRL

SEQ ID NO: 42 - protein, 30 aa, Homo sapiens
GLCNACTWRQNTKSSRIEAIKIQILSKLRL

SEQ ID NO: 43 - protein, 30 aa, Homo sapiens
ALAALPKDVPNSQPEMVEAVKKHILNMLHL

SEQ ID NO: 44 - protein, 30 aa, Homo sapiens
GGFRRPEELGRVDGDFLEAVKRHILSRLQM

SEQ ID NO: 45 - protein, 28 aa, Homo sapiens
GGPTLELESQRELLLDLAKRSILDKLHL

SEQ ID NO: 46 - protein, 28 aa, Homo sapiens
GGSKLAPQAERALVLELAKQQILDGLHL

SEQ ID NO: 47 - protein, 16 aa, Homo sapiens
LTGEQLLGSLLRQLQL

SEQ ID NO: 48 - protein, 16 aa, Homo sapiens
LTEEQLLGSLLRQLQL

SEQ ID NO: 49 - protein, 3 aa, Homo sapiens
LSL

SEQ ID NO: 50 - protein, 30 aa, Homo sapiens
GAWLRDPGGQRLVVLHLEEVTWEPTPSLRF

SEQ ID NO: 51 - protein, 23 aa, Homo sapiens
CQGLELARELVLAKVRALFLDAL

SEQ ID NO: 52 - protein, 16 aa, Homo sapiens
PVPPGPAAALLQALGL

SEQ ID NO: 53 - protein, 11 aa, Homo sapiens
QEYVFLQFLGL

SEQ ID NO: 54 - protein, 30 aa, Homo sapiens
VTPKGQLPGGKAPPKAGSVPSSFLLKKARE

SEQ ID NO: 55 - protein, 30 aa, Homo sapiens
KEGKMQRAPRDSDAGREGQEPQPRPQDEPR

SEQ ID NO: 56 - protein, 30 aa, Homo sapiens
RAAGAGPVRSPGGGGGGGGGGRTLAQAAGA

SEQ ID NO: 57 - protein, 30 aa, Homo sapiens
FGDVFSEQDGVDFNTLLQSMKDEFLKTLNL

SEQ ID NO: 58 - protein, 30 aa, Homo sapiens
VPGGGLPEHTFNLKMFLENVKVDFLRSLNL

SEQ ID NO: 59 - protein, 12 aa, Homo sapiens
TVATALLRTRGQ

SEQ ID NO: 60 - protein, 30 aa, Homo sapiens
AAASSGRPSSQPSDEVLSEFELRLLSMFGL

SEQ ID NO: 61 - protein, 29 aa, Homo sapiens
QGHAGGRRSGQSHELLRDFEATLLQMFGL

SEQ ID NO: 62 - protein, 30 aa, Homo sapiens
NHVHSSFIYRRLRNHERREIQREILSILGL

SEQ ID NO: 63 - protein, 30 aa, Homo sapiens
PQSSSGFLYRRLKTQEKREMQKEILSVLGL

SEQ ID NO: 64 - protein, 30 aa, Homo sapiens
NEVHSSFIHRRLRSQERREMQREILSILGL

SEQ ID NO: 65 - protein, 30 aa, Homo sapiens
LRPPPGCPQRRLGARERRDVQREILAVLGL

SEQ ID NO: 66 - protein, 29 aa, Homo sapiens
HRAQMAEGGQSSIALLAEAPTLPLIEELL

SEQ ID NO: 67 - protein, 30 aa, Homo sapiens
AELESGAMPWSLLQHIDERDRAGLLPALFK

SEQ ID NO: 68 - protein, 20 aa, Homo sapiens
ERPKPPFPELRKAVPGDRTA

SEQ ID NO: 69 - protein, 23 aa, Homo sapiens
SHRAPAWSALPAAADGLQGDRDL

SEQ ID NO: 70 - protein, 21 aa, Homo sapiens
FPLPAGKRPPEAPAEDRSLGR

SEQ ID NO: 71 - protein, 30 aa, Homo sapiens
HRLGPALVPLHRLPRTLDARIARLAQYRAL

SEQ ID NO: 72 - protein, 5 aa, Homo sapiens
WGPDA

SEQ ID NO: 73 - protein, 30 aa, Homo sapiens
PREGPPPVLASPAGHLPGGRTARWCSGRAR

SEQ ID NO: 74 - protein, 390 aa, Homo sapiens
MPPSGLRLLPLLLPLLWLLVLTPGRPAAGLSTCKTIDMELVKRKRIEAIRGQILSKLRLASPPSQGEVPPGPLPEAVLALYNSTRDRVAGESAEPEPEPEADYYAKEVTRVLMVETHNEIYDKFKQSTHSIYMFFNTSELREAVPEPVLLSRAELRLLRLKLKVEQHVELYQKYSNNSWRYLSNRLLAPSDSPEWLSFDVTGVVRQWLSRGGEIEGFRLSAHCSCDSRDNTLQVDINGFTTGRRGDLATIHGMNRPFLLLMATPLERAQHLQSSRHRRALDTNYCFSSTEKNCCVRQLYIDFRKDLGWKWIHEPKGYHANFCLGPCPYIWSLDTQYSKVLALYNQHNPGASAAPCCVPQALEPLPIVYYVGRKPKVEQLSNMIVRSCKCS

SEQ ID NO: 75 - protein, 442 aa, Homo sapiens
MHYCVLSAFLILHLVTVALSLSTCSTLDMDQFMRKRIEAIRGQILSKLKLTSPPEDYPEPEEVPPEVISIYNSTRDLLQEKASRRAAACERERSDEEYYAKEVYKIDMPPFFPSETVCPVVTTPSGSVGSLCSRQSQVLCGYLDAIPPTFYRPYFRIVRFDVSAMEKNASNLVKAEFRVFRLQNPKARVPEQRIELYQILKSKDLTSPTQRYIDSKVVKTRAEGEWLSFDVTDAVHEWLHHKDRNLGFKISLHCPCCTFVPSNNYIIPNKSEELEARFAGIDGTSTYTSGDQKTIKSTRKKNSGKTPHLLLMLLPSYRLESQQTNRRKKRALDAAYCFRNVQDNCCLRPLYIDFKRDLGWKWIHEPKGYNANFCAGACPYLWSSDTQHSRVLSLYNTINPEASASPCCVSQDLEPLTILYYIGKTPKIEQLSNMIVKSCKCS

SEQ ID NO: 76 - protein, 414 aa, Homo sapiens
MHYCVLSAFLILHLVTVALSLSTCSTLDMDQFMRKRIEAIRGQILSKLKLTSPPEDYPEPEEVPPEVISIYNSTRDLLQEKASRRAAACERERSDEEYYAKEVYKIDMPPFFPSENAIPPTFYRPYFRIVRFDVSAMEKNASNLVKAEFRVFRLQNPKARVPEQRIELYQILKSKDLTSPTQRYIDSKVVKTRAEGEWLSFDVTDAVHEWLHHKDRNLGFKISLHCPCCTFVPSNNYIIPNKSEELEARFAGIDGTSTYTSGDQKTIKSTRKKNSGKTPHLLLMLLPSYRLESQQTNRRKKRALDAAYCFRNVQDNCCLRPLYIDFKRDLGWKWIHEPKGYNANFCAGACPYLWSSDTQHSRVLSLYNTINPEASASPCCVSQDLEPLTILYYIGKTPKIEQLSNMIVKSCKCS

SEQ ID NO: 77 - protein, 412 aa, Homo sapiens
MKMHLQRALVVLALLNFATVSLSLSTCTTLDFGHIKKKRVEAIRGQILSKLRLTSPPEPTVMTHVPYQVLALYNSTRELLEEMHGEREEGCTQENTESEYYAKEIHKFDMIQGLAEHNELAVCPKGITSKVFRFNVSSVEKNRTNLFRAEFRVLRVPNPSSKRNEQRIELFQILRPDEHIAKQRYIGGKNLPTRGTAEWLSFDVTDTVREWLLRRESNLGLEISIHCPCHTFQPNGDILENIHEVMEIKFKGVDNEDDHGRGDLGRLKKQKDHHNPHLILMMIPPHRLDNPGQGGQRKKRALDTNYCFRNLEENCCVRPLYIDFRQDLGWKWVHEPKGYYANFCSGPCPYLRSADTTHSTVLGLYNTLNPEASASPCCVPQDLEPLTILYYVGRTPKVEQLSNMVVKSCKCS

SEQ ID NO: 78 - protein, 407 aa, Homo sapiens
MVLAAPLLLGFLLLALELRPRGEAAEGPAAAAAAAAAAAAAGVGGERSSRPAPSVAPEPDGCPVCVWRQHSRELRLESIKSQILSKLRLKEAPNISREVVKQLLPKAPPLQQILDLHDFQGDALQPEDFLEEDEYHATTETVISMAQETDPAVQTDGSPLCCHFHFSPKVMFTKVLKAQLWVYLRPVPRPATVYLQILRLKPLTGEGTAGGGGGGRRHIRIRSLKIELHSRSGHWQSIDFKQVLHSWFRQPQSNWGIEINAFDPSGTDLAVTSLGPGAEGLHPFMELRVLENTKRSRRNLGLDCDEHSSESRCCRYPLTVDFEAFGWDWIIAPKRYKANYCSGQCEYMFMQKYPHTHLVQQANPRGSAGPCCTPTKMSPINMLYFNDKQQIIYGKIPGMVVDRCGCS

SEQ ID NO: 79 - protein, 375 aa, Homo sapiens
MQKLQLCVYIYLFMLIVAGPVDLNENSEQKENVEKEGLCNACTWRQNTKSSRIEAIKIQILSKLRLETAPNISKDVIRQLLPKAPPLRELIDQYDVQRDDSSDGSLEDDDYHATTETIITMPTESDFLMQVDGKPKCCFFKFSSKIQYNKVVKAQLWIYLRPVETPTTVFVQILRLIKPMKDGTRYTGIRSLKLDMNPGTGIWQSIDVKTVLQNWLKQPESNLGIEIKALDENGHDLAVTFPGPGEDGLNPFLEVKVTDTPKRSRRDFGLDCDEHSTESRCCRYPLTVDFEAFGWDWIIAPKRYKANYCSGECEFVFLQKYPHTHLVHQANPRGSAGPCCTPTKMSPINMLYFNGKEQIIYGKIPAMVVDRCGCS

SEQ ID NO: 80 - protein, 426 aa, Homo sapiens
MPLLWLRGFLLASCWIIVRSSPTPGSEGHSAAPDCPSCALAALPKDVPNSQPEMVEAVKKHILNMLHLKKRPDVTQPVPKAALLNAIRKLHVGKVGENGYVEIEDDIGRRAEMNELMEQTSEIITFAESGTARKTLHFEISKEGSDLSVVERAEVWLFLKVPKANRTRTKVTIRLFQQQKHPQGSLDTGEEAEEVGLKGERSELLLSEKVVDARKSTWHVFPVSSSIQRLLDQGKSSLDVRIACEQCQESGASLVLLGKKKKKEEEGEGKKKGGGEGGAGADEEKEQSHRPFLMLQARQSEDHPHRRRRRGLECDGKVNICCKKQFFVSFKDIGWNDWIIAPSGYHANYCEGECPSHIAGTSGSSLSFHSTVINHYRMRGHSPFANLKSCCVPTKLRPMSMLYYDDGQNIIKKDIQNMIVEECGCS

SEQ ID NO: 81 - protein, 407 aa, Homo sapiens
MDGLPGRALGAACLLLLAAGWLGPEAWGSPTPPPTPAAPPPPPPPGSPGGSQDTCTSCGGFRRPEELGRVDGDFLEAVKRHILSRLQMRGRPNITHAVPKAAMVTALRKLHAGKVREDGRVEIPHLDGHASPGADGQERVSEIISFAETDGLASSRVRLYFFISNEGNQNLFVVQASLWLYLKLLPYVLEKGSRRKVRVKVYFQEQGHGDRWNMVEKRVDLKRSGWHTFPLTEAIQALFERGERRLNLDVQCDSCQELAVVPVFVDPGEESHRPFVVVQARLGDSRHRIRKRGLECDGRTNLCCRQQFFIDFRLIGWNDWIIAPTGYYGNYCEGSCPAYLAGVPGSASSFHTAVVNQYRMRGLNPGTVNSCCIPTKLSTMSMLYFDDEYNIVKRDVPNMIVEECGCA

SEQ ID NO: 82 - protein, 352 aa, Homo sapiens
MTSSLLLAFLLLAPTTVATPRAGGQCPACGGPTLELESQRELLLDLAKRSILDKLHLTQRPTLNRPVSRAALRTALQHLHGVPQGALLEDNREQECEIISFAETGLSTINQTRLDFHFSSDRTAGDREVQQASLMFFVQLPSNTTWTLKVRVLVLGPHNTNLTLATQYLLEVDASGWHQLPLGPEAQAACSQGHLTLELVLEGQVAQSSVILGGAAHRPFVAARVRVGGKHQIHRRGIDCQGGSRMCCRQEFFVDFREIGWHDWIIQPEGYAMNFCIGQCPLHIAGMPGIAASFHTAVLNLLKANTAAGTTGGGSCCVPTARRPLSLLYYDRDSNIVKTDIPDMVVEACGCS

SEQ ID NO: 83 - protein, 350 aa, Homo sapiens
MRLPDVQLWLVLLWALVRAQGTGSVCPSCGGSKLAPQAERALVLELAKQQILDGLHLTSRPRITHPPPQAALTRALRRLQPGSVAPGNGEEVISFATVTDSTSAYSSLLTFHLSTPRSHHLYHARLWLHVLPTLPGTLCLRIFRWGPRRRRQGSRTLLAEHHITNLGWHTLTLPSSGLRGEKSGVLKLQLDCRPLEGNSTVTGQPRRLLDTAGHQQPFLELKIRANEPGAGRARRRTPTCEPATPLCCRRDHYVDFQELGWRDWILQPEGYQLNYCSGQCPPHLAGSPGIAASFHSAVFSLLKANNPWPASTSCCVPTARRPLSLLYLDHNGNVVKTDVPDMVVEACGCS

SEQ ID NO: 84 - protein, 366 aa, Homo sapiens
MQPLWLCWALWVLPLASPGAALTGEQLLGSLLRQLQLKEVPTLDRADMEELVIPTHVRAQYVALLQRSHGDRSRGKRFSQSFREVAGRFLALEASTHLLVFGMEQRLPPNSELVQAVLRLFQEPVPKAALHRHGRLSPRSARARVTVEWLRVRDDGSNRTSLIDSRLVSVHESGWKAFDVTEAVNFWQQLSRPRQPLLLQVSVQREHLGPLASGAHKLVRFASQGAPAGLGEPQLELHTLDLGDYGAQGDCDPEAPMTEGTRCCRQEMYIDLQGMKWAENWVLEPPGFLAYECVGTCRQPPEALAFKWPFLGPRQCIASETDSLPMIVSIKEGGRTRPQVVSLPNMRVQKCSCASDGALVPRRLQP

SEQ ID NO: 85 - protein, 366 aa, Homo sapiens
MWPLWLCWALWVLPLAGPGAALTEEQLLGSLLRQLQLSEVPVLDRADMEKLVIPAHVRAQYVVLLRRSHGDRSRGKRFSQSFREVAGRFLASEASTHLLVFGMEQRLPPNSELVQAVLRLFQEPVPKAALHRHGRLSPRSAQARVTVEWLRVRDDGSNRTSLIDSRLVSVHESGWKAFDVTEAVNFWQQLSRPRQPLLLQVSVQREHLGPLASGAHKLVRFASQGAPAGLGEPQLELHTLDLRDYGAQGDCDPEAPMTEGTRCCRQEMYIDLQGMKWAKNWVLEPPGFLAYECVGTCQQPPEALAFNWPFLGPRQCIASETASLPMIVSIKEGGRTRPQVVSLPNMRVQKCSCASDGALVPRRLQP

SEQ ID NO: 86 - protein, 308 aa, Homo sapiens
MPGQELRTVNGSQMLLVLLVLSWLPHGGALSLAEASRASFPGPSELHSEDSRFRELRKRYEDLLTRLRANQSWEDSNTDLVPAPAVRILTPEVRLGSGGHLHLRISRAALPEGLPEASRLHRALFRLSPTASRSWDVTRPLRRQLSLARPQAPALHLRLSPPPSQSDQLLAESSSARPQLELHLRPQAARGRRRARARNGDHCPLGPGRCCRLHTVRASLEDLGWADWVLSPREVQVTMCIGACPSQFRAANMHAQIKTSLHRLKPDTVPAPCCVPASYNPMVLIQKTDTGVSLQTYDDLLAKDCHCI

SEQ ID NO: 87 - protein, 560 aa, Homo sapiens
MRDLPLTSLALVLSALGALLGTEALRAEEPAVGTSGLIFREDLDWPPGSPQEPLCLVALGGDSNGSSSPLRVVGALSAYEQAFLGAVQRARWGPRDLATFGVCNTGDRQAALPSLRRLGAWLRDPGGQRLVVLHLEEVTWEPTPSLRFQEPPPGGAGPPELALLVLYPGPGPEVTVTRAGLPGAQSLCPSRDTRYLVLAVDRPAGAWRGSGLALTLQPRGEDSRLSTARLQALLFGDDHRCFTRMTPALLLLPRSEPAPLPAHGQLDTVPFPPPRPSAELEESPPSADPFLETLTRLVRALRVPPARASAPRLALDPDALAGFPQGLVNLSDPAALERLLDGEEPLLLLLRPTAATTGDPAPLHDPTSAPWATALARRVAAELQAAAAELRSLPGLPPATAPLLARLLALCPGGPGGLGDPLRALLLLKALQGLRVEWRGRDPRGPGRAQRSAGATAADGPCALRELSVDLRAERSVLIPETYQANNCQGVCGWPQSDRNPRYGNHVVLLLKMQARGAALARPPCCVPTAYAGKLLISLSEERISAHHVPNMVATECGCR

SEQ ID NO: 88 - protein, 366 aa, Homo sapiens
MVLHLLLFLLLTPQGGHSCQGLELARELVLAKVRALFLDALGPPAVTREGGDPGVRRLPRRHALGGFTHRGSEPEEEEDVSQAILFPATDASCEDKSAARGLAQEAEEGLFRYMFRPSQHTRSRQVTSAQLWFHTGLDRQGTAASNSSEPLLGLLALSPGGPVAVPMSLGHAPPHWAVLHLATSALSLLTHPVLVLLLRCPLCTCSARPEATPFLVAHTRTRPPSGGERARRSTPLMSWPWSPSALRLLQRPPEEPAAHANCHRVALNISFQELGWERWIVYPPSFIFHYCHGGCGLHIPPNLSLPVPGAPPTPAQPYSLLPGAQPCCAALPGTMRPLHVRTTSDGGYSFKYETVPNLLTQHCACI

SEQ ID NO: 89 - protein, 372 aa, Homo sapiens
MPPPQQGPCGHHLLLLLALLLPSLPLTRAPVPPGPAAALLQALGLRDEPQGAPRLRPVPPVMWRLFRRRDPQETRSGSRRTSPGVTLQPCHVEELGVAGNIVRHIPDRGAPTRASEPASAAGHCPEWTVVFDLSAVEPAERPSRARLELRFAAAAAAAPEGGWELSVAQAGQGAGADPGPVLLRQLVPALGPPVRAELLGAAWARNASWPRSLRLALALRPRAPAACARLAEASLLLVTLDPRLCHPLARPRRDAEPVLGGGPGGACRARRLYVSFREVGWHRWVIAPRGFLANYCQGQCALPVALSGSGGPPALNHAVLRALMHAAAPGAADLPCCVPARLSPISVLFFDNSDNVVLRQYEDMVVDECGCR

SEQ ID NO: 90 - protein, 364 aa, Homo sapiens
MLRFLPDLAFSFLLILALGQAVQFQEYVFLQFLGLDKAPSPQKFQPVPYILKKIFQDREAAATTGVSRDLCYVKELGVRGNVLRFLPDQGFFLYPKKISQASSCLQKLLYFNLSAIKEREQLTLAQLGLDLGPNSYYNLGPELELALFLVQEPHVWGQTTPKPGKMFVLRSVPWPQGAVHFNLLDVAKDWNDNPRKNFGLFLEILVKEDRDSGVNFQPEDTCARLRCSLHASLLVVTLNPDQCHPSRKRRAAIPVPKLSCKNLCHRHQLFINFRDLGWHKWIIAPKGFMANYCHGECPFSLTISLNSSNYAFMQALMHAVDPEIPQAVCIPTKLSPISMLYQDNNDNVILRHYEDMVVDECGCG

SEQ ID NO: 91 - protein, 501 aa, Homo sapiens
MRLPKLLTFLLWYLAWLDLEFICTVLGAPDLGQRPQGTRPGLAKAEAKERPPLARNVFRPGGHSYGGGATNANARAKGGTGQTGGLTQPKKDEPKKLPPRPGGPEPKPGHPPQTRQATARTVTPKGQLPGGKAPPKAGSVPSSFLLKKAREPGPPREPKEPFRPPPITPHEYMLSLYRTLSDADRKGGNSSVKLEAGLANTITSFIDKGQDDRGPVVRKQRYVFDISALEKDGLLGAELRILRKKPSDTAKPAAPGGGRAAQLKLSSCPSGRQPASLLDVRSVPGLDGSGWEVFDIWKLFRNFKNSAQLCLELEAWERGRAVDLRGLGFDRAARQVHEKALFLVFGRTKKRDLFFNEIKARSGQDDKTVYEYLFSQRRKRRAPLATRQGKRPSKNLKARCSRKALHVNFKDMGWDDWIIAPLEYEAFHCEGLCEFPLRSHLEPTNHAVIQTLMNSMDPESTPPTCCVPTRLSPISILFIDSANNVVYKQYEDMVVESCGCR

SEQ ID NO: 92 - protein, 455 aa, Homo sapiens
MDTPRVLLSAVFLISFLWDLPGFQQASISSSSSSAELGSTKGMRSRKEGKMQRAPRDSDAGREGQEPQPRPQDEPRAQQPRAQEPPGRGPRVVPHEYMLSIYRTYSIAEKLGINASFFQSSKSANTITSFVDRGLDDLSHTPLRRQKYLFDVSMLSDKEELVGAELRLFRQAPSAPWGPPAGPLHVQLFPCLSPLLLDARTLDPQGAPPAGWEVFDVWQGLRHQPWKQLCLELRAAWGELDAGEAEARARGPQQPPPPDLRSLGFGRRVRPPQERALLVVFTRSQRKNLFAEMREQLGSAEAAGPGAGAEGSWPPPSGAPDARPWLPSPGRRRRRTAFASRHGKRHGKKSRLRCSKKPLHVNFKELGWDDWIIAPLEYEAYHCEGVCDFPLRSHLEPTNHAIIQTLMNSMDPGSTPPSCCVPTKLTPISILYIDAGNNVVYKQYEDMVVESCGCR

SEQ ID NO: 93 - protein, 450 aa, Homo sapiens
MDLSAAAALCLWLLSACRPRDGLEAAAVLRAAGAGPVRSPGGGGGGGGGGRTLAQAAGAAAVPAAAVPRARAARRAAGSGFRNGSVVPHHFMMSLYRSLAGRAPAGAAAVSASGHGRADTITGFTDQATQDESAAETGQSFLFDVSSLNDADEVVGAELRVLRRGSPESGPGSWTSPPLLLLSTCPGAARAPRLLYSRAAEPLVGQRWEAFDVADAMRRHRREPRPPRAFCLLLRAVAGPVPSPLALRRLGFGWPGGGGSAAEERAVLVVSSRTQRKESLFREIRAQARALGAALASEPLPDPGTGTASPRAVIGGRRRRRTALAGTRTAQGSGGGAGRGHGRRGRSRCSRKPLHVDFKELGWDDWIIAPLDYEAYHCEGLCDFPLRSHLEPTNHAIIQTLLNSMAPDAAPASCCVPARLSPISILYIDAANNVVYKQYEDMVVEACGCR

SEQ ID NO: 94 - protein, 424 aa, Homo sapiens
MGSLVLTLCALFCLAAYLVSGSPIMNLEQSPLEEDMSLFGDVFSEQDGVDFNTLLQSMKDEFLKTLNLSDIPTQDSAKVDPPEYMLELYNKFATDRTSMPSANIIRSFKNEDLFSQPVSFNGLRKYPLLFNVSIPHHEEVIMAELRLYTLVQRDRMIYDGVDRKITIFEVLESKGDNEGERNMLVLVSGEIYGTNSEWETFDVTDAIRRWQKSGSSTHQLEVHIESKHDEAEDASSGRLEIDTSAQNKHNPLLIVFSDDQSSDKERKEELNEMISHEQLPELDNLGLDSFSSGPGEEALLQMRSNIIYDSTARIRRNAKGNYCKRTPLYIDFKEIGWDSWIIAPPGYEAYECRGVCNYPLAEHLTPTKHAIIQALVHLKNSQKASKACCVPTKLEPISILYLDKGVVTYKFKYEGMAVSECGCR

SEQ ID NO: 95 - protein, 429 aa, Homo sapiens
MCPGALWVALPLLSLLAGSLQGKPLQSWGRGSAGGNAHSPLGVPGGGLPEHTFNLKMFLENVKVDFLRSLNLSGVPSQDKTRVEPPQYMIDLYNRYTSDKSTTPASNIVRSFSMEDAISITATEDFPFQKHILLFNISIPRHEQITRAELRLYVSCQNHVDPSHDLKGSVVIYDVLDGTDAWDSATETKTFLVSQDIQDEGWETLEVSSAVKRWVRSDSTKSKNKLEVTVESHRKGCDTLDISVPPGSRNLPFFVVFSNDHSSGTKETRLELREMISHEQESVLKKLSKDGSTEAGESSHEEDTDGHVAAGSTLARRKRSAGAGSHCQKTSLRVNFEDIGWDSWIIAPKEYEAYECKGGCFFPLADDVTPTKHAIVQTLVHLKFPTKVGKACCVPTKLSPISVLYKDDMGVPTLKYHYEGMSVAECGCR

SEQ ID NO: 96 - protein, 347 aa, Homo sapiens
MHAHCLPFLLHAWWALLQAGAATVATALLRTRGQPSSPSPLAYMLSLYRDPLPRADIIRSLQAEDVAVDGQNWTFAFDFSFLSQQEDLAWAELRLQLSSPVDLPTEGSLAIEIFHQPKPDTEQASDSCLERFQMDLFTVTLSQVTFSLGSMVLEVTRPLSKWLKHPGALEKQMSRVAGECWPRPPTPPATNVLLMLYSNLSQEQRQLGGSTLLWEAESSWRAQEGQLSWEWGKRHRRHHLPDRSQLCRKVKFQVDFNLIGWGSWIIYPKQYNAYRCEGECPNPVGEEFHPTNHAYIQSLLKRYQPHRVPSTCCAPVKTKPLSMLYVDNGRVLLDHHKDMIVEECGCL

SEQ ID NO: 97 - protein, 396 aa, Homo sapiens
MVAGTRCLLALLLPQVLLGGAAGLVPELGRRKFAAASSGRPSSQPSDEVLSEFELRLLSMFGLKQRPTPSRDAVVPPYMLDLYRRHSGQPGSPAPDHRLERAASRANTVRSFHHEESLEELPETSGKTTRRFFFNLSSIPTEEFITSAELQVFREQMQDALGNNSSFHHRINIYEIIKPATANSKFPVTRLLDTRLVNQNASRWESFDVTPAVMRWTAQGHANHGFVVEVAHLEEKQGVSKRHVRISRSLHQDEHSWSQIRPLLVTFGHDGKGHPLHKREKRQAKHKQRKRLKSSCKRHPLYVDFSDVGWNDWIVAPPGYHAFYCHGECPFPLADHLNSTNHAIVQTLVNSVNSKIPKACCVPTELSAISMLYLDENEKVVLKNYQDMVVEGCGCR

SEQ ID NO: 98 - protein, 408 aa, Homo sapiens
MIPGNRMLMVVLLCQVLLGGASHASLIPETGKKKVAEIQGHAGGRRSGQSHELLRDFEATLLQMFGLRRRPQPSKSAVIPDYMRDLYRLQSGEEEEEQIHSTGLEYPERPASRANTVRSFHHEEHLENIPGTSENSAFRFLFNLSSIPENEVISSAELRLFREQVDQGPDWERGFHRINIYEVMKPPAEVVPGHLITRLLDTRLVHHNVTRWETFDVSPAVLRWTREKQPNYGLAIEVTHLHQTRTHQGQHVRISRSLPQGSGNWAQLRPLLVTFGHDGRGHALTRRRRAKRSPKHHSQRARKKNKNCRRHSLYVDFSDVGWNDWIVAPPGYQAFYCHGDCPFPLADHLNSTNHAIVQTLVNSVNSSIPKACCVPTELSAISMLYLDEYDKVVLKNYQEMVVEGCGCR

SEQ ID NO: 99 - protein, 454 aa, Homo sapiens
MHLTVFLLKGIVGFLWSCWVLVGYAKGGLGDNHVHSSFIYRRLRNHERREIQREILSILGLPHRPRPFSPGKQASSAPLFMLDLYNAMTNEENPEESEYSVRASLAEETRGARKGYPASPNGYPRRIQLSRTTPLTTQSPPLASLHDTNFLNDADMVMSFVNLVERDKDFSHQRRHYKEFRFDLTQIPHGEAVTAAEFRIYKDRSNNRFENETIKISIYQIIKEYTNRDADLFLLDTRKAQALDVGWLVFDITVTSNHWVINPQNNLGLQLCAETGDGRSINVKSAGLVGRQGPQSKQPFMVAFFKASEVLLRSVRAANKRKNQNRNKSSSHQDSSRMSSVGDYNTSEQKQACKKHELYVSFRDLGWQDWIIAPEGYAAFYCDGECSFPLNAHMNATNHAIVQTLVHLMFPDHVPKPCCAPTKLNAISVLYFDDSSNVILKKYRNMVVRSCGCH

SEQ ID NO: 100 - protein, 513 aa, Homo sapiens
MPGLGRRAQWLCWWWGLLCSCCGPPPLRPPLPAAAAAAAGGQLLGDGGSPGRTEQPPPSPQSSSGFLYRRLKTQEKREMQKEILSVLGLPHRPRPLHGLQQPQPPALRQQEEQQQQQQLPRGEPPPGRLKSAPLFMLDLYNALSADNDEDGASEGERQQSWPHEAASSSQRRQPPPGAAHPLNRKSLLAPGSGSGGASPLTSAQDSAFLNDADMVMSFVNLVEYDKEFSPRQRHHKEFKFNLSQIPEGEVVTAAEFRIYKDCVMGSFKNQTFLISIYQVLQEHQHRDSDLFLLDTRVVWASEEGWLEFDITATSNLWVVTPQHNMGLQLSVVTRDGVHVHPRAAGLVGRDGPYDKQPFMVAFFKVSEVHVRTTRSASSRRRQQSRNRSTQSQDVARVSSASDYNSSELKTACRKHELYVSFQDLGWQDWIIAPKGYAANYCDGECSFPLNAHMNATNHAIVQTLVHLMNPEYVPKPCCAPTKLNAISVLYFDDNSNVILKKYRNMVVRACGCH

SEQ ID NO: 101 - protein, 431 aa, Homo sapiens
MHVRSLRAAAPHSFVALWAPLFLLRSALADFSLDNEVHSSFIHRRLRSQERREMQREILSILGLPHRPRPHLQGKHNSAPMFMLDLYNAMAVEEGGGPGGQGFSYPYKAVFSTQGPPLASLQDSHFLTDADMVMSFVNLVEHDKEFFHPRYHHREFRFDLSKIPEGEAVTAAEFRIYKDYIRERFDNETFRISVYQVLQEHLGRESDLFLLDSRTLWASEEGWLVFDITATSNHWVVNPRHNLGLQLSVETLDGQSINPKLAGLIGRHGPQNKQPFMVAFFKATEVHFRSIRSTGSKQRSQNRSKTPKNQEALRMANVAENSSSDQRQACKKHELYVSFRDLGWQDWIIAPEGYAAYYCEGECAFPLNSYMNATNHAIVQTLVHFINPETVPKPCCAPTQLNAISVLYFDDSSNVILKKYRNMVVRACGCH

SEQ ID NO: 102 - protein, 402 aa, Homo sapiens
MAARPGPLWLLGLTLCALGGGGPGLRPPPGCPQRRLGARERRDVQREILAVLGLPGRPRPRAPPAASRLPASAPLFMLDLYHAMAGDDDEDGAPAEQRLGRADLVMSFVNMVERDRALGHQEPHWKEFRFDLTQIPAGEAVTAAEFRIYKVPSIHLLNRTLHVSMFQVVQEQSNRESDLFFLDLQTLRAGDEGWLVLDVTAASDCWLLKRHKDLGLRLYVETEDGHSVDPGLAGLLGQRAPRSQQPFVVTFFRASPSPIRTPRAVRPLRRRQPKKSNELPQANRLPGIFDDVRGSHGRQVCRRHELYVSFQDLGWLDWVIAPQGYSAYYCEGECSFPLDSCMNATNHAILQSLVHLMKPNAVPKACCAPTKLSATSVLYYDSSNNVILRKHRNMVVKACGCH

SEQ ID NO: 103 - protein, 402 aa, Homo sapiens
MTALPGPLWLLGLALCALGGGGPGLRPPPGCPQRRLGARERRDVQREILAVLGLPGRPRPRAPPAASRLPASAPLFMLDLYHAMAGDDDEDGAPAERRLGRADLVMSFVNMVERDRALGHQEPHWKEFRFDLTQIPAGEAVTAAEFRIYKVPSIHLLNRTLHVSMFQVVQEQSNRESDLFFLDLQTLRAGDEGWLVLDVTAASDCWLLKRHKDLGLRLYVETEDGHSVDPGLAGLLGQRAPRSQQPFVVTFFRASPSPIRTPRAVRPLRRRQPKKSNELPQANRLPGIFDDVHGSHGRQVCRRHELYVSFQDLGWLDWVIAPQGYSAYYCEGECSFPLDSCMNATNHAILQSLVHLMMPDAVPKACCAPTKLSATSVLYYDSSNNVILRKHRNMVVKACGCH

SEQ ID NO: 104 - protein, 392 aa, Homo sapiens
MVLLSILRILFLCELVLFMEHRAQMAEGGQSSIALLAEAPTLPLIEELLEESPGEQPRKPRLLGHSLRYMLELYRRSADSHGHPRENRTIGATMVRLVKPLTNVARPHRGTWHIQILGFPLRPNRGLYQLVRATVVYRHHLQLTRFNLSCHVEPWVQKNPTNHFPSSEGDSSKPSLMSNAWKEMDITQLVQQRFWNNKGHRILRLRFMCQQQKDSGGLELWHGTSSLDIAFLLLYFNDTHKSIRKAKFLPRGMEEFMERESLLRRTRQADGISAEVTASSSKHSGPENNQCSLHPFQISFRQLGWDHWIIAPPFYTPNYCKGTCLRVLRDGLNSPNHAIIQNLINQLVDQSVPRPSCVPYKYVPISVLMIEANGSILYKEYEGMIAESCTCR

SEQ ID NO: 105 - protein, 454 aa, Homo sapiens
MARPNKFLLWFCCFAWLCFPISLGSQASGGEAQIAASAELESGAMPWSLLQHIDERDRAGLLPALFKVLSVGRGGSPRLQPDSRALHYMKKLYKTYATKEGIPKSNRSHLYNTVRLFTPCTRHKQAPGDQVTGILPSVELLFNLDRITTVEHLLKSVLLYNINNSVSFSSAVKCVCNLMIKEPKSSSRTLGRAPYSFTFNSQFEFGKKHKWIQIDVTSLLQPLVASNKRSIHMSINFTCMKDQLEHPSAQNGLFNMTLVSPSLILYLNDTSAQAYHSWYSLHYKRRPSQGPDQERSLSAYPVGEEAAEDGRSSHHRHRRGQETVSSELKKPLGPASFNLSEYFRQFLLPQNECELHDFRLSFSQLKWDNWIVAPHRYNPRYCKGDCPRAVGHRYGSPVHTMVQNIIYEKLDSSVPRPSCVPAKYSPLSVLTIEPDGSIAYKEYEDMIATKCTCR

SEQ ID NO: 106 - protein, 472 aa, Homo sapiens
MAGASRLLFLWLGCFCVSLAQGERPKPPFPELRKAVPGDRTAGGGPDSELQPQDKVSEHMLRLYDRYSTVQAARTPGSLEGGSQPWRPRLLREGNTVRSFRAAAAETLERKGLYIFNLTSLTKSENILSATLYFCIGELGNISLSCPVSGGCSHHAQRKHIQIDLSAWTLKFSRNQSQLLGHLSVDMAKSHRDIMSWLSKDITQLLRKAKENEEFLIGFNITSKGRQLPKRRLPFPEPYILVYANDAAISEPESVVSSLQGHRNFPTGTVPKWDSHIRAALSIERRKKRSTGVLLPLQNNELPGAEYQYKKDEVWEERKPYKTLQAQAPEKSKNKKKQRKGPHRKSQTLQFDEQTLKKARRKQWIEPRNCARRYLKVDFADIGWSEWIISPKSFDAYYCSGACQFPMPKSLKPSNHATIQSIVRAVGVVPGIPEPCCVPEKMSSLSILFFDENKNVVLKVYPNMTVESCACR

SEQ ID NO: 107 - protein, 478 aa, Homo sapiens
MAHVPARTSPGPGPQLLLLLLPLFLLLLRDVAGSHRAPAWSALPAAADGLQGDRDLQRHPGDAAATLGPSAQDMVAVHMHRLYEKYSRQGARPGGGNTVRSFRARLEVVDQKAVYFFNLTSMQDSEMILTATFHFYSEPPRWPRALEVLCKPRAKNASGRPLPLGPPTRQHLLFRSLSQNTATQGLLRGAMALAPPPRGLWQAKDISPIVKAARRDGELLLSAQLDSEERDPGVPRPSPYAPYILVYANDLAISEPNSVAVTLQRYDPFPAGDPEPRAAPNNSADPRVRRAAQATGPLQDNELPGLDERPPRAHAQHFHKHQLWPSPFRALKPRPGRKDRRKKGQEVFMAASQVLDFDEKTMQKARRKQWDEPRVCSRRYLKVDFADIGWNEWIISPKSFDAYYCAGACEFPMPKIVRPSNHATIQSIVRAVGIIPGIPEPCCVPDKMNSLGVLFLDENRNVVLKVYPNMSVDTCACR

SEQ ID NO: 108 - protein, 211 aa, Homo sapiens
MKLWDVVAVCLVLLHTASAFPLPAGKRPPEAPAEDRSLGRRRAPFALSSDSNMPEDYPDQFDDVMDFIQATIKRLKRSPDKQMAVLPRRERNRQAAAANPENSRGKGRRGQRGKNRGCVLTAIHLNVTDLGLGYETKEELIFRYCSGSCDAAETTYDKILKNLSRNRRLVSDKVGQACCRPIAFDDDLSFLDDNLVYHILRKHSAKRCGCI

SEQ ID NO: 109 - protein, 197 aa, Homo sapiens
MQRWKAAALASVLCSSVLSIWMCREGLLLSHRLGPALVPLHRLPRTLDARIARLAQYRALLQGAPDAMELRELTPWAGRPPGPRRRAGPRRRRARARLGARPCGLRELEVRVSELGLGYASDETVLFRYCAGACEAAARVYDLGLRRLRQRRRLRRERVRAQPCCRPTAYEDEVSFLDAHSRYHTVHELSARECACV

SEQ ID NO: 110 - protein, 156 aa, Homo sapiens
MAVGKFLLGSLLLLSLQLGQGWGPDARGVPVADGEFSSEQVAKAGGTWLGTHRPLARLRRALSGPCQLWSLTLSVAELGLGYASEEKVIFRYCAGSCPRGARTQHGLALARLQGQGRAHGGPCCRPTRYTDVAFLDDRHRWQRLPQLSAAACGCGG

SEQ ID NO: 111 - protein, 220 aa, Homo sapiens
MELGLGGLSTLSHCPWPRQQPALWPTLAALALLSSVAEASLGSAPRSPAPREGPPPVLASPAGHLPGGRTARWCSGRARRPPPQPSRPAPPPPAPPSALPRGGRAARAGGPGSRARAAGARGCRLRSQLVPVRALGLGHRSDELVRFRFCSGSCRRARSPHDLSLASLLGAGALRPPPGSRPVSQPCCRPTRYEAVSFMDVNSTWRTVDRLSATACGCLG

SEQ ID NO: 112 - protein, 1179 aa, Homo sapiens
MAPRPRARPGVAVACCWLLTVVLRCCVSFNVDVKNSMTFSGPVEDMFGYTVQQYENEEGKWVLIGSPLVGQPKNRTGDVYKCPVGRGESLPCVKLDLPVNTSIPNVTEVKENMTFGSTLVTNPNGGFLACGPLYAYRCGHLHYTTGICSDVSPTFQVVNSIAPVQECSTQLDIVIVLDGSNSIYPWDSVTAFLNDLLERMDIGPKQTQVGIVQYGENVTHEFNLNKYSSTEEVLVAAKKIVQRGGRQTMTALGIDTARKEAFTEARGARRGVKKVMVIVTDGESHDNHRLKKVIQDCEDENIQRFSIAILGSYNRGNLSTEKFVEEIKSIASEPTEKHFFNVSDELALVTIVKTLGERIFALEATADQSAASFEMEMSQTGFSAHYSQDWVMLGAVGAYDWNGTVVMQKASQIIIPRNTTFNVESTKKNEPLASYLGYTVNSATASSGDVLYIAGQPRYNHTGQVIIYRMEDGNIKILQTLSGEQIGSYFGSILTTTDIDKDSNTDILLVGAPMYMGTEKEEQGKVYVYALNQTRFEYQMSLEPIKQTCCSSRQHNSCTTENKNEPCGARFGTAIAAVKDLNLDGFNDIVIGAPLEDDHGGAVYIYHGSGKTIRKEYAQRIPSGGDGKTLKFFGQSIHGEMDLNGDGLTDVTIGGLGGAALFWSRDVAVVKVTMNFEPNKVNIQKKNCHMEGKETVCINATVCFDVKLKSKEDTIYEADLQYRVTLDSLRQISRSFFSGTQERKVQRNITVRKSECTKHSFYMLDKHDFQDSVRITLDFNLTDPENGPVLDDSLPNSVHEYIPFAKDCGNKEKCISDLSLHVATTEKDLLIVRSQNDKFNVSLTVKNTKDSAYNTRTIVHYSPNLVFSGIEAIQKDSCESNHNITCKVGYPFLRRGEMVTFKILFQFNTSYLMENVTIYLSATSDSEEPPETLSDNVVNISIPVKYEVGLQFYSSASEYHISIAANETVPEVINSTEDIGNEINIFYLIRKSGSFPMPELKLSISFPNMTSNGYPVLYPTGLSSSENANCRPHIFEDPFSINSGKKMTTSTDHLKRGTILDCNTCKFATITCNLTSSDISQVNVSLILWKPTFIKSYFSSLNLTIRGELRSENASLVLSSSNQKRELAIQISKDGLPGRVPLWVILLSAFAGLLLLMLLILALWKIGFFKRPLKKKMEK

SEQ ID NO: 113 - protein, 1181 aa, Homo sapiens
MGPERTGAAPLPLLLVLALSQGILNCCLAYNVGLPEAKIFSGPSSEQFGYAVQQFINPKGNWLLVGSPWSGFPENRMGDVYKCPVDLSTATCEKLNLQTSTSIPNVTEMKTNMSLGLILTRNMGTGGFLTCGPLWAQQCGNQYYTTGVCSDISPDFQLSASFSPATQPCPSLIDVVVVCDESNSIYPWDAVKNFLEKFVQGLDIGPTKTQVGLIQYANNPRVVFNLNTYKTKEEMIVATSQTSQYGGDLTNTFGAIQYARKYAYSAASGGRRSATKVMVVVTDGESHDGSMLKAVIDQCNHDNILRFGIAVLGYLNRNALDTKNLIKEIKAIASIPTERYFFNVSDEAALLEKAGTLGEQIFSIEGTVQGGDNFQMEMSQVGFSADYSSQNDILMLGAVGAFGWSGTIVQKTSHGHLIFPKQAFDQILQDRNHSSYLGYSVAAISTGESTHFVAGAPRANYTGQIVLYSVNENGNITVIQAHRGDQIGSYFGSVLCSVDVDKDTITDVLLVGAPMYMSDLKKEEGRVYLFTIKEGILGQHQFLEGPEGIENTRFGSAIAALSDINMDGFNDVIVGSPLENQNSGAVYIYNGHQGTIRTKYSQKILGSDGAFRSHLQYFGRSLDGYGDLNGDSITDVSIGAFGQVVQLWSQSIADVAIEASFTPEKITLVNKNAQIILKLCFSAKFRPTKQNNQVAIVYNITLDADGFSSRVTSRGLFKENNERCLQKNMVVNQAQSCPEHIIYIQEPSDVVNSLDLRVDISLENPGTSPALEAYSETAKVFSIPFHKDCGEDGLCISDLVLDVRQIPAAQEQPFIVSNQNKRLTFSVTLKNKRESAYNTGIVVDFSENLFFASFSLPVDGTEVTCQVAASQKSVACDVGYPALKREQQVTFTINFDFNLQNLQNQASLSFQALSESQEENKADNLVNLKIPLLYDAEIHLTRSTNINFYEISSDGNVPSIVHSFEDVGPKFIFSLKVTTGSVPVSMATVIIHIPQYTKEKNPLMYLTGVQTDKAGDISCNADINPLKIGQTSSSVSFKSENFRHTKELNCRTASCSNVTCWLKDVHMKGEYFVNVTTRIWNGTFASSTFQTVQLTAAAEINTYNPEIYVIEDNTVTIPLMIMKPDEKAEVPTGVIIGSIIAGILLLLALVAILWKLGFFKRKYEKMTKNPDEIDETTELSS

SEQ ID NO: 114 - protein, 1039 aa, Homo sapiens
MARALCPLQALWLLEWVLLLLGPCAAPPAWALNLDPVQLTFYAGPNGSQFGFSLDFHKDSHGRVAIVVGAPRTLGPSQEETGGVFLCPWRAEGGQCPSLLFDLRDETRNVGSQTLQTFKARQGLGASVVSWSDVIVACAPWQHWNVLEKTEEAEKTPVGSCFLAQPESGRRAEYSPCRGNTLSRIYVENDFSWDKRYCEAGFSSVVTQAGELVLGAPGGYYFLGLLAQAPVADIFSSYRPGILLWHVSSQSLSFDSSNPEYFDGYWGYSVAVGEFDGDLNTTEYVVGAPTWSWTLGAVEILDSYYQRLHRLRGEQMASYFGHSVAVTDVNGDGRHDLLVGAPLYMESRADRKLAEVGRVYLFLQPRGPHALGAPSLLLTGTQLYGRFGSAIAPLGDLDRDGYNDIAVAAPYGGPSGRGQVLVFLGQSEGLRSRPSQVLDSPFPTGSAFGFSLRGAVDIDDNGYPDLIVGAYGANQVAVYRAQPVVKASVQLLVQDSLNPAVKSCVLPQTKTPVSCFNIQMCVGATGHNIPQKLSLNAELQLDRQKPRQGRRVLLLGSQQAGTTLNLDLGGKHSPICHTTMAFLRDEADFRDKLSPIVLSLNVSLPPTEAGMAPAVVLHGDTHVQEQTRIVLDCGEDDVCVPQLQLTASVTGSPLLVGADNVLELQMDAANEGEGAYEAELAVHLPQGAHYMRALSNVEGFERLICNQKKENETRVVLCELGNPMKKNAQIGIAMLVSVGNLEEAGESVSFQLQIRSKNSQNPNSKIVLLDVPVRAEAQVELRGNSFPASLVVAAEEGEREQNSLDSWGPKVEHTYELHNNGPGTVNGLHLSIHLPGQSQPSDLLYILDIQPQGGLQCFPQPPVNPLKVDWGLPIPSPSPIHPAHHKRDRRQIFLPEPEQPSRLQDPVLVSCDSAPCTVVQCDLQEMARGQRAMVTVLAFLWLPSLYQRPLDQFVLQSHAWFNVSSLPYAVPPLSLPRGEAQVWTQLLRALEERAIPIWWVLVGVLGGLLLLTILVLAMWKVGFFKRNRPPLEEDDEEGE

SEQ ID NO: 115 - protein, 1066 aa, Homo sapiens
MGPGPSRAPRAPRLMLCALALMVAAGGCVVSAFNLDTRFLVVKEAGNPGSLFGYSVALHRQTERQQRYLLLAGAPRELAVPDGYTNRTGAVYLCPLTAHKDDCERMNITVKNDPGHHIIEDMWLGVTVASQGPAGRVLVCAHRYTQVLWSGSEDQRRMVGKCYVRGNDLELDSSDDWQTYHNEMCNSNTDYLETGMCQLGTSGGFTQNTVYFGAPGAYNWKGNSYMIQRKEWDLSEYSYKDPEDQGNLYIGYTMQVGSFILHPKNITIVTGAPRHRHMGAVFLLSQEAGGDLRRRQVLEGSQVGAYFGSAIALADLNNDGWQDLLVGAPYYFERKEEVGGAIYVFMNQAGTSFPAHPSLLLHGPSGSAFGLSVASIGDINQDGFQDIAVGAPFEGLGKVYIYHSSSKGLLRQPQQVIHGEKLGLPGLATFGYSLSGQMDVDENFYPDLLVGSLSDHIVLLRARPVINIVHKTLVPRPAVLDPALCTATSCVQVELCFAYNQSAGNPNYRRNITLAYTLEADRDRRPPRLRFAGSESAVFHGFFSMPEMRCQKLELLLMDNLRDKLRPIIISMNYSLPLRMPDRPRLGLRSLDAYPILNQAQALENHTEVQFQKECGPDNKCESNLQMRAAFVSEQQQKLSRLQYSRDVRKLLLSINVTNTRTSERSGEDAHEALLTLVVPPALLLSSVRPPGACQANETIFCELGNPFKRNQRMELLIAFEVIGVTLHTRDLQVQLQLSTSSHQDNLWPMILTLLVDYTLQTSLSMVNHRLQSFFGGTVMGESGMKTVEDVGSPLKYEFQVGPMGEGLVGLGTLVLGLEWPYEVSNGKWLLYPTEITVHGNGSWPCRPPGDLINPLNLTLSDPGDRPSSPQRRRRQLDPGGGQGPPPVTLAAAKKAKSETVLTCATGRAHCVWLECPIPDAPVVTNVTVKARVWNSTFIEDYRDFDRVRVNGWATLFLRTSIPTINMENKTTWFSVDIDSELVEELPAEIELWLVLVAVGAGLLLLGLIILLLWKCDFFKRTRYYQIMPKYHAVRIREEERYPPPGSTLPTKKHWVTSWQTRDQYY

SEQ ID NO: 116 - protein, 1032 aa, Homo sapiens [sequence omitted]

SEQ ID NO: 117 - protein, 1049 aa, Homo sapiens
MGSRTPESPLHAVQLRWGPRRRPPLLPLLLLLLPPPPRVGGFNLDAEAPAVLSGPPGSFFGFSVEFYRPGTDGVSVLVGAPKANTSQPGVLQGGAVYLCPWGASPTQCTPIEFDSKGSRLLESSLSSSEGEEPVEYKSLQWFGATVRAHGSSILACAPLYSWRTEKEPLSDPVGTCYLSTDNFTRILEYAPCRSDFSWAAGQGYCQGGFSAEFTKTGRVVLGGPGSYFWQGQILSATQEQIAESYYPEYLINLVQGQLQTRQASSIYDDSYLGYSVAVGEFSGDDTEDFVAGVPKGNLTYGYVTILNGSDIRSLYNFSGEQMASYFGYAVAATDVNGDGLDDLLVGAPLLMDRTPDGRPQEVGRVYVYLQHPAGIEPTPTLTLTGHDEFGRFGSSLTPLGDLDQDGYNDVAIGAPFGGETQQGVVFVFPGGPGGLGSKPSQVLQPLWAASHTPDFFGSALRGGRDLDGNGYPDLIVGSFGVDKAVVYRGRPIVSASASLTIFPAMFNPEERSCSLEGNPVACINLSFCLNASGKHVADSIGFTVELQLDWQKQKGGVRRALFLASRQATLTQTLLIQNGAREDCREMKIYLRNESEFRDKLSPIHIALNFSLDPQAPVDSHGLRPALHYQSKSRIEDKAQILLDCGEDNICVPDLQLEVFGEQNHVYLGDKNALNLTFHAQNVGEGGAYEAELRVTAPPEAEYSGLVRHPGNFSSLSCDYFAVNQSRLLVCDLGNPMKAGASLWGGLRFTVPHLRDTKKTIQFDFQILSKNLNNSQSDVVSFRLSVEAQAQVTLNGVSKPEAVLFPVSDWHPRDQPQKEEDLGPAVHHVYELINQGPSSISQGVLELSCPQALEGQQLLYVTRVTGLNCTTNHPINPKGLELDPEGSLHHQQKREAPSRSSASSGPQILKCPEAECFRLRCELGPLHQQESQSLQLHFRVWAKTFLQREHQPFSLQCEAVYKALKMPYRILPRQLPQKERQVATAVQWTKAEGSYGVPLWIIILAILFGLLLLGLLIYILYKLGFFKRSLPYGTAMEKAQLKPPATSDA

SEQ ID NO: 118 - protein, 1091 aa, Homo sapiens
MAAAGQLCLLYLSAGLLSRLGAAFNLDTREDNVIRKYGDPGSLFGFSLAMHWQLQPEDKRLLLVGAPRAEALPLQRANRTGGLYSCDITARGPCTRIEFDNDADPTSESKEDQWMGVTVQSQGPGGKVVTCAHRYEKRQHVNTKQESRDIFGRCYVLSQNLRIEDDMDGGDWSFCDGRLRGHEKFGSCQQGVAATFTKDFHYIVFGAPGTYNWKGIVRVEQKNNTFFDMNIFEDGPYEVGGETEHDESLVPVPANSYLGFSLDSGKGIVSKDEITFVSGAPRANHSGAVVLLKRDMKSAHLLPEHIFDGEGLASSFGYDVAVVDLNKDGWQDIVIGAPQYFDRDGEVGGAVYVYMNQQGRWNNVKPIRLNGTKDSMFGIAVKNIGDINQDGYPDIAVGAPYDDLGKVFIYHGSANGINTKPTQVLKGISPYFGYSIAGNMDLDRNSYPDVAVGSLSDSVTIFRSRPVINIQKTITVTPNRIDLRQKTACGAPSGICLQVKSCFEYTANPAGYNPSISIVGTLEAEKERRKSGLSSRVQFRNQGSEPKYTQELTLKRQKQKVCMEETLWLQDNIRDKLRPIPITASVEIQEPSSRRRVNSLPEVLPILNSDEPKTAHIDVHFLKEGCGDDNVCNSNLKLEYKFCTREGNQDKFSYLPIQKGVPELVLKDQKDIALEITVTNSPSNPRNPTKDGDDAHEAKLIATFPDTLTYSAYRELRAFPEKQLSCVANQNGSQADCELGNPFKRNSNVTFYLVLSTTEVTFDTPDLDINLKLETTSNQDNLAPITAKAKVVIELLLSVSGVAKPSQVYFGGTVVGEQAMKSEDEVGSLIEYEFRVINLGKPLTNLGTATLNIQWPKEISNGKWLLYLVKVESKGLEKVTCEPQKEINSLNLTESHNSRKKREITEKQIDDNRKFSLFAERKYQTLNCSVNVNCVNIRCPLRGLDSKASLILRSRLWNSTFLEEYSKLNYLDILMRAFIDVTAAAENIRLPNAGTQVRVTVFPSKTVAQYSGVPWWIILVAILAGILMLALLVFILWKCGFFKRSRYDDSVPRYHAVRIRKEEREIKDEKYIDNLEKKQWITKWNENESYS

SEQ ID NO: 119 - protein, 1141 aa, Homo sapiens
MAGARSRDPWGASGICYLFGSLLVELLFSRAVAFNLDVMGALRKEGEPGSLFGFSVALHRQLQPRPQSWLLVGAPQALALPGQQANRTGGLFACPLSLEETDCYRVDIDQGADMQKESKENQWLGVSVRSQGPGGKIVTCAHRYEARQRVDQILETRDMIGRCFVLSQDLAIRDELDGGEWKFCEGRPQGHEQFGFCQQGTAAAFSPDSHYLLFGAPGTYNWKGTARVELCAQGSADLAHLDDGPYEAGGEKEQDPRLIPVPANSYFGFSIDSGKGLVRAEELSFVAGAPRANHKGAVVILRKDSASRLVPEVMLSGERLTSGFGYSLAVADLNSDGWPDLIVGAPYFFERQEELGGAVYVYLNQGGHWAGISPLRLCGSPDSMFGISLAVLGDLNQDGFPDIAVGAPFDGDGKVFIYHGSSLGVVAKPSQVLEGEAVGIKSFGYSLSGSLDMDGNQYPDLLVGSLADTAVLFRARPILHVSHEVSIAPRSIDLEQPNCAGGHSVCVDLRVCFSYIAVPSSYSPTVALDYVLDADTDRRLRGQVPRVTFLSRNLEEPKHQASGTVWLKHQHDRVCGDAMFQLQENVKDKLRAIVVTLSYSLQTPRLRRQAPGQGLPPVAPILNAHQPSTQRAEIHFLKQGCGEDKICQSNLQLVRARFCTRVSDTEFQPLPMDVDGTTALFALSGQPVIGLELMVTNLPSDPAQPQADGDDAHEAQLLVMLPDSLHYSGVRALDPAEKPLCLSNENASHVECELGNPMKRGAQVTFYLILSTSGISIETTELEVELLLATISEQELHPVSARARVFIELPLSIAGMAIPQQLFFSGVVRGERAMQSERDVGSKVKYEVTVSNQGQSLRTLGSAFLNIMWPHEIANGKWLLYPMQVELEGGQGPGQKGLCSPRPNILHLDVDSRDRRRRELEPPEQQEPGERQEPSMSWWPVSSAEKKKNITLDCARGTANCVVFSCPLYSFDRAAVLHVWGRLWNSTFLEEYSAVKSLEVIVRANITVKSSIKNLMLRDASTVIPVMVYLDPMAVVAEGVPWWVILLAVLAGLLVLALLVLLLWKMGFFKRAKHPEATVPQYHAVKIPREDRQQFKEEKTGTILRNNWGSPRREGPDAHPILAADGHPELGPDGHPGPGTA

SEQ ID NO: 120 - protein, 1063 aa, Homo sapiens
MSPGASRGPRGSQAPLIAPLCCAAAALGMLLWSPACQAFNLDVEKLTVYSGPKGSYFGYAVDFHIPDARTASVLVGAPKANTSQPDIVEGGAVYYCPWPAEGSAQCRQIPFDTTNNRKIRVNGTKEPIEFKSNQWFGATVKAHKGKVVACAPLYHWRTLKPTPEKDPVGTCYVAIQNFSAYAEFSPCRNSNADPEGQGYCQAGFSLDFYKNGDLIVGGPGSFYWQGQVITASVADIIANYSFKDILRKLAGEKQTEVAPASYDDSYLGYSVAAGEFTGDSQQELVAGIPRGAQNFGYVSIINSTDMTFIQNFTGEQMASYFGYTVVVSDVNSDGLDDVLVGAPLFMEREFESNPREVGQIYLYLQVSSLLFRDPQILTGTETFGRFGSAMAHLGDLNQDGYNDIAIGVPFAGKDQRGKVLIYNGNKDGLNTKPSQVLQGVWASHAVPSGFGFTLRGDSDIDKNDYPDLIVGAFGTGKVAVYRARPVVTVDAQLLLHPMIINLENKTCQVPDSMTSAACFSLRVCASVTGQSIANTIVLMAEVQLDSLKQKGAIKRTLFLDNHQAHRVFPLVIKRQKSHQCQDFIVYLRDETEFRDKLSPINISLNYSLDESTFKEGLEVKPILNYYRENIVSEQAHILVDCGEDNLCVPDLKLSARPDKHQVIIGDENHLMLIINARNEGEGAYEAELFVMIPEEADYVGIERNNKGFRPLSCEYKMENVTRMVVCDLGNPMVSGTNYSLGLRFAVPRLEKTNMSINFDLQIRSSNKDNPDSNFVSLQINITAVAQVEIRGVSHPPQIVLPIHNWEPEEEPHKEEEVGPLVEHIYELHNIGPSTISDTILEVGWPFSARDEFLLYIFHIQTLGPLQCQPNPNINPQDIKPAASPEDTPELSAFLRNSTIPHLVRKRDVHVVEFHRQSPAKILNCTNIECLQISCAVGRLEGGESAVLKVRSRLWAHTFLQRKNDPYALASLVSFEVKKMPYTDQPAKLPEGSIAIKTSVIWATPNVSFSIPLWVIILAILLGLLVLAILTLALWKCGFFDRARPPQEDMTDREQLTNDKTPEA

SEQ ID NO: 121 - protein, 1035 aa, Homo sapiens
MGGPAAPRGAGRLRALLLALVVAGIPAGAYNLDPQRPVHFQGPADSFFGYAVLEHFHDNTRWVLVGAPKADSKYSPSVKSPGAVFKCRVHTNPDRRCTELDMARGKNRGTSCGKTCREDRDDEWMGVSLARQPKADGRVLACAHRWKNIYYEADHILPHGFCYIIPSNLQAKGRTLIPCYEEYKKKYGEEHGSCQAGIAGFFTEELVVMGAPGSFYWAGTIKVLNLTDNTYLKLNDEVIMNRRYTYLGYAVTAGHFSHPSTIDVVGGAPQDKGIGKVYIFRADRRSGTLIKIFQASGKKMGSYFGSSLCAVDLNGDGLSDLLVGAPMFSEIRDEGQVTVYINRGNGALEEQLALTGDGAYNAHFGESIASLDDLDNDGFPDVAIGAPKEDDFAGAVYIYHGDAGGIVPQYSMKLSGQKINPVLRMFGQSISGGIDMDGNGYPDVTVGAFMSDSVVLLRARPVITVDVSIFLPGSINITAPQCHDGQQPVNCLNVTTCFSFHGKHVPGEIGLNYVLMADVAKKEKGQMPRVYFVLLGETMGQVTEKLQLTYMEETCRHYVAHVKRRVQDVISPIVFEAAYSLSEHVTGEEERELPPLTPVLRWKKGQKIAQKNQTVFERNCRSEDCAADLQLQGKLLLSSMDEKTLYLALGAVKNISLNISISNLGDDAYDANVSFNVSRELFFINMWQKEEMGISCELLESDFLKCSVGFPFMRSKSKYEFSVIFDTSHLSGEEEVLSFIVTAQSGNTERSESLHDNTLVLMVPLMHEVDTSITGIMSPTSFVYGESVDAANFIQLDDLECHFQPINITLQVYNTGPSTLPGSSVSISFPNRLSSGGAEMFHVQEMVVGQEKGNCSFQKNPTPCIIPQEQENIFHTIFAFFTKSGRKVLDCEKPGISCLTAHCNFSALAKEESRTIDIYMLLNTEILKKDSSSVIQFMSRAKVKVDPALRVVEIAHGNPEEVTVVFEALHNLEPRGYVVGWIIAISLLVGILIFLLLAVLLWKMGFFRRRYKEIIEAEKNRKENEDSWDWVQKNQ

SEQ ID NO: 122 - protein, 1167 aa, Homo sapiens
MELPFVTHLFLPLVFLTGLCSPFNLDEHHPRLFPGPPEAEFGYSVLQHVGGGQRWMLVGAPWDGPSGDRRGDVYRCPVGGAHNAPCAKGHLGDYQLGNSSHPAVNMHLGMSLLETDGDGGFMACAPLWSRACGSSVFSSGICARVDASFQPQGSLAPTAQRCPTYMDVVIVLDGSNSIYPWSEVQTFLRRLVGKLFIDPEQIQVGLVQYGESPVHEWSLGDFRTKEEVVRAAKNLSRREGRETKTAQAIMVACTEGFSQSHGGRPEAARLLVVVTDGESHDGEELPAALKACEAGRVTRYGIAVLGHYLRRQRDPSSFLREIRTIASDPDERFFFNVTDEAALTDIVDALGDRIFGLEGSHAENESSFGLEMSQIGFSTHRLKDGILFGMVGAYDWGGSVLWLEGGHRLFPPRMALEDEFPPALQNHAAYLGYSVSSMLLRGGRRLFLSGAPRFRHRGKVIAFQLKKDGAVRVAQSLQGEQIGSYFGSELCPLDTDRDGTTDVLLVAAPMFLGPQNKETGRVYVYLVGQQSLLTLQGTLQPEPPQDARFGFAMGALPDLNQDGFADVAVGAPLEDGHQGALYLYHGTQSGVRPHPAQRIAAASMPHALSYFGRSVDGRLDLDGDDLVDVAVGAQGAAILLSSRPIVHLTPSLEVTPQAISVVQRDCRRRGQEAVCLTAALCFQVTSRTPGRWDHQFYMRFTASLDEWTAGARAAFDGSGQRLSPRRLRLSVGNVTCEQLHFHVLDTSDYLRPVALTVTFALDNTTKPGPVLNEGSPTSIQKLVPFSKDCGPDNECVTDLVLQVNMDIRGSRKAPFVVRGGRRKVLVSTTLENRKENAYNTSLSLIFSRNLHLASLTPQRESPIKVECAAPSAHARLCSVGHPVFQTGAKVTFLLEFEFSCSSLLSQVFVKLTASSDSLERNGTLQDNTAQTSAYIQYEPHLLFSSESTLHRYEVHPYGTLPVGPGPEFKTTLRVQNLGCYVVSGLIISALLPAVAHGGNYFLSLSQVITNNASCIVQNLTEPPGPPVHPEELQHTNRLNGSNTQCQVVRCHLGQLAKGTEVSVGLLRLVHNEFFRRAKFKSLTVVSTFELGTEEGSVLQLTEASRWSESLLEVVQTRPILISLWILIGSVLGGLLLLALLVFCLWKLGFFAHKKIPEEEKREEKLEQ

SEQ ID NO: 123 - protein, 1188 aa, Homo sapiens
MDLPRGLVVAWALSLWPGFTDTFNMDTRKPRVIPGSRTAFFGYTVQQHDISGNKWLVVGAPLETNGYQKTGDVYKCPVIHGNCTKLNLGRVTLSNVSERKDNMRLGLSLATNPKDNSFLACSPLWSHECGSSYYTTGMCSRVNSNFRFSKTVAPALQRCQTYMDIVIVLDGSNSIYPWVEVQHFLINILKKFYIGPGQIQVGVVQYGEDVVHEFHLNDYRSVKDVVEAASHIEQRGGTETRTAFGIEFARSEAFQKGGRKGAKKVMIVITDGESHDSPDLEKVIQQSERDNVTRYAVAVLGYYNRRGINPETFLNEIKYIASDPDDKHFFNVTDEAALKDIVDALGDRIFSLEGTNKNETSFGLEMSQTGFSSHVVEDGVLLGAVGAYDWNGAVLKETSAGKVIPLRESYLKEFPEELKNHGAYLGYTVTSVVSSRQGRVYVAGAPRFNHTGKVILFTMHNNRSLTIHQAMRGQQIGSYFGSEITSVDIDGDGVTDVLLVGAPMYFNEGRERGKVYVYELRQNLFVYNGTLKDSHSYQNARFGSSIASVRDLNQDSYNDVVVGAPLEDNHAGAIYIFHGFRGSILKTPKQRITASELATGLQYFGCSIHGQLDLNEDGLIDLAVGALGNAVILWSRPVVQINASLHFEPSKINIFHRDCKRSGRDATCLAAFLCFTPIFLAPHFQTTTVGIRYNATMDERRYTPRAHLDEGGDRFTNRAVLLSSGQELCERINFHVLDTADYVKPVTFSVEYSLEDPDHGPMLDDGWPTTLRVSVPFWNGCNEDEHCVPDLVLDARSDLPTAMEYCQRVLRKPAQDCSAYTLSFDTTVFIIESTRQRVAVEATLENRGENAYSTVLNISQSANLQFASLIQKEDSDGSIECVNEERRLQKQVCNVSYPFFRAKAKVAFRLDFEFSKSIFLHHLEIELAAGSDSNERDSTKEDNVAPLRFHLKYEADVLFTRSSSLSHYEVKPNSSLERYDGIGPPFSCIFRIQNLGLFPIHGMMMKITIPIATRSGNRLLKLRDFLTDEANTSCNIWGNSTEYRPTPVEEDLRRAPQLNHSNSDVVSINCNIRLVPNQEINFHLLGNLWLRSLKALKYKSMKIMVNAALQRQFHSPFIFREEDPSRQIVFEISKQEDWQVPIWIIVGSTLGGLLLLALLVLALWKLGFFRSARRRREPGLDPTPKVLE

SEQ ID NO: 124 - protein, 1161 aa, Homo sapiens
MTFGTVLLLSVLASYHGFNLDVEEPTIFQEDAGGFGQSVVQFGGSRLVVGAPLEVVAANQTGRLYDCAAATGMCQPIPLHIRPEAVNMSLGLTLAASTNGSRLLACGPTLHRVCGENSYSKGSCLLLGSRWEIIQTVPDATPECPHQEMDIVFLIDGSGSIDQNDFNQMKGFVQAVMGQFEGTDTLFALMQYSNLLKIHFTFTQFRTSPSQQSLVDPIVQLKGLTFTATGILTVVTQLFHHKNGARKSAKKILIVITDGQKYKDPLEYSDVIPQAEKAGIIRYAIGVGHAFQGPTARQELNTISSAPPQDHVFKVDNFAALGSIQKQLQEKIYAVEGTQSRASSSFQHEMSQEGFSTALTMDGLFLGAVGSFSWSGGAFLYPPNMSPTFINMSQENVDMRDSYLGYSTELALWKGVQNLVLGAPRYQHTGKAVIFTQVSRQWRKKAEVTGTQIGSYFGASLCSVDVDSDGSTDLILIGAPHYYEQTRGGQVSVCPLPRGRVQWQCDAVLRGEQGHPWGRFGAALTVLGDVNEDKLIDVAIGAPGEQENRGAVYLFHGASESGISPSHSQRIASSQLSPRLQYFGQALSGGQDLTQDGLMDLAVGARGQVLLLRSLPVLKVGVAMRFSPVEVAKAVYRCWEEKPSALEAGDATVCLTIQKSSLDQLGDIQSSVRFDLALDPGRLTSRAIFNETKNPTLTRRKTLGLGIHCETLKLLLPDCVEDVVSPIILHLNFSLVREPIPSPQNLRPVLAVGSQDLFTASLPFEKNCGQDGLCEGDLGVTLSFSGLQTLTVGSSLELNVIVTVWNAGEDSYGTVVSLYYPAGLSHRRVSGAQKQPHQSALRLACETVPTEDEGLRSSRCSVNHPIFHEGSNGTFIVTFDVSYKATLGDRMLMRASASSENNKASSSKATFQLELPVKYAVYTMISRQEESTKYFNFATSDEKKMKEAEHRYRVNNLSQRDLAISINFWVPVLLNGVAVWDVVMEAPSQSLPCVSERKPPQHSDFLTQISRSPMLDCSIADCLQFRCDVPSFSVQEELDFTLKGNLSFGWVRETLQKKVLVVSVAEITFDTSVYSQLPGQEAFMRAQMEMVLEEDEVYNAIPIIMGSSVGALLLLALITATLYKLGFFKRHYKEMLEDKPEDTATFSGDDFSCVAPNVPLS

SEQ ID NO: 125 - protein, 1179 aa, Homo sapiens
MWLFHTLLCIASLALLAAFNVDVARPWLTPKGGAPFVLSSLLHQDPSTNQTWLLVTSPRTKRTPGPLHRCSLVQDEILCHPVEHVPIPKGRHRGVTVVRSHHGVLICIQVLVRRPHSLSSELTGTCSLLGPDLRPQAQANFFDLENLLDPDARVDTGDCYSNKEGGGEDDVNTARQRRALEKEEEEDKEEEEDEEEEEAGTEIAIILDGSGSIDPPDFQRAKDFISNMMRNFYEKCFECNFALVQYGGVIQTEFDLRDSQDVMASLARVQNITQVGSVTKTASAMQHVLDSIFTSSHGSRRKASKVMVVLTDGGIFEDPLNLTTVINSPKMQGVERFAIGVGEEFKSARTARELNLIASDPDETHAFKVTNYMALDGLLSKLRYNIISMEGTVGDALHYQLAQIGFSAQILDERQVLLGAVGAFDWSGGALLYDTRSRRGRFLNQTAAAAADAEAAQYSYLGYAVAVLHKTCSLSYIAGAPRYKHHGAVFELQKEGREASFLPVLEGEQMGSYFGSELCPVDIDMDGSTDFLLVAAPFYHVHGEEGRVYVYRLSEQDGSFSLARILSGHPGFTNARFGFAMAAMGDLSQDKLTDVAIGAPLEGFGADDGASFGSVYIYNGHWDGLSASPSQRIRASTVAPGLQYFGMSMAGGFDISGDGLADITVGTLGQAVVFRSRPVVRLKVSMAFTPSALPIGFNGVVNVRLCFEISSVTTASESGLREALLNFTLDVDVGKQRRRLQCSDVRSCLGCLREWSSGSQLCEDLLLMPTEGELCEEDCFSNASVKVSYQLQTPEGQTDHPQPILDRYTEPFAIFQLPYEKACKNKLFCVAELQLATTVSQQELVVGLTKELTLNINLTNSGEDSYMTSMALNYPRNLQLKRMQKPPSPNIQCDDPQPVASVLIMNCRIGHPVLKRSSAHVSVVWQLEENAFPNRTADITVTVTNSNERRSLANETHTLQFRHGFVAVLSKPSIMYVNTGQGLSHHKEFLFHVHGENLFGAEYQLQICVPTKLRGLQVVAVKKLTRTQASTVCTWSQERACAYSSVQHVEEWHSVSCVIASDKENVTVAAEISWDHSEELLKDVTELQILGEISFNKSLYEGLNAENHRTKITVVFLKDEKYHSLPIIIKGSVGGLLVLIVILVILFKCGFFKRKYQQLNLESIRKAQLKSENLLEEEN

SEQ ID NO: 126 - protein, 1170 aa, Homo sapiens
MKDSCITVMAMALLSGFFFFAPASSYNLDVRGARSFSPPRAGRHFGYRVLQVGNGVIVGAPGEGNSTGSLYQCQSGTGHCLPVTLRGSNYTSKYLGMTLATDPTDGSILACDPGLSRTCDQNTYLSGLCYLFRQNLQGPMLQGRPGFQECIKGNVDLVFLFDGSMSLQPDEFQKILDFMKDVMKKLSNTSYQFAAVQFSTSYKTEFDFSDYVKRKDPDALLKHVKHMLLLTNTFGAINYVATEVFREELGARPDATKVLIIITDGEATDSGNIDAAKDIIRYIIGIGKHFQTKESQETLHKFASKPASEFVKILDTFEKLKDLFTELQKKIYVIEGTSKQDLTSFNMELSSSGISADLSRGHAVVGAVGAKDWAGGFLDLKADLQDDTFIGNEPLTPEVRAGYLGYTVTWLPSRQKTSLLASGAPRYQHMGRVLLFQEPQGGGHWSQVQTIHGTQIGSYFGGELCGVDVDQDGETELLLIGAPLFYGEQRGGRVFIYQRRQLGFEEVSELQGDPGYPLGRFGEAITALTDINGDGLVDVAVGAPLEEQGAVYIFNGRHGGLSPQPSQRIEGTQVLSGIQWFGRSIHGVKDLEGDGLADVAVGAESQMIVLSSRPVVDMVTLMSFSPAEIPVHEVECSYSTSNKMKEGVNITICFQIKSLIPQFQGRLVANLTYTLQLDGHRTRRRGLFPGGRHELRRNIAVTTSMSCTDFSFHFPVCVQDLISPINVSLNFSLWEEEGTPRDQRAQGKDIPPILRPSLHSETWEIPFEKNCGEDKKCEANLRVSFSPARSRALRLTAFASLSVELSLSNLEEDAYWVQLDLHFPPGLSFRKVEMLKPHSQIPVSCEELPEESRLLSRALSCNVSSPIFKAGHSVALQMMFNTLVNSSWGDSVELHANVTCNNEDSDLLEDNSATTIIPILYPINILIQDQEDSTLYVSFTPKGPKIHQVKHMYQVRIQPSIHDHNIPTLEAVVGVPQPPSEGPITHQWSVQMEPPVPCHYEDLERLPDAAEPCLPGALFRCPVVFRQEILVQVIGTLELVGEIEASSMFSLCSSLSISFNSSKHFHLYGSNASLAQVVMKVDVVYEKQMLYLYVLSGIGGLLLLLLIFIVLYKVGFFKRNLKEKMEAGRGVPNGIPAEDSEQLASGQEAGDPGCLKPLHEKDSESGGGKD

SEQ ID NO: 127 - protein, 1153 aa, Homo sapiens
MALRVLLLTALTLCHGFNLDTENAMTFQENARGFGQSVVQLQGSRVVVGAPQEIVAANQRGSLYQCDYSTGSCEPIRLQVPVEAVNMSLGLSLAATTSPPQLLACGPTVHQTCSENTYVKGLCFLFGSNLRQQPQKFPEALRGCPQEDSDIAFLIDGSGSIIPHDFRRMKEFVSTVMEQLKKSKTLFSLMQYSEEFRIHFTFKEFQNNPNPRSLVKPITQLLGRTHTATGIRKVVRELFNITNGARKNAFKILVVITDGEKFGDPLGYEDVIPEADREGVIRYVIGVGDAFRSEKSRQELNTIASKPPRDHVFQVNNFEALKTIQNQLREKIFAIEGTQTGSSSSFEHEMSQEGFSAAITSNGPLLSTVGSYDWAGGVFLYTSKEKSTFINMTRVDSDMNDAYLGYAAAIILRNRVQSLVLGAPRYQHIGLVAMFRQNTGMWESNANVKGTQIGAYFGASLCSVDVDSNGSTDLVLIGAPHYYEQTRGGQVSVCPLPRGQRARWQCDAVLYGEQGQPWGRFGAALTVLGDVNGDKLTDVAIGAPGEEDNRGAVYLFHGTSGSGISPSHSQRIAGSKLSPRLQYFGQSLSGGQDLTMDGLVDLTVGAQGHVLLLRSQPVLRVKAIMEFNPREVARNVFECNDQVVKGKEAGEVRVCLHVQKSTRDRLREGQIQSVVTYDLALDSGRPHSRAVFNETKNSTRRQTQVLGLTQTCETLKLQLPNCIEDPVSPIVLRLNFSLVGTPLSAFGNLRPVLAEDAQRLFTALFPFEKNCGNDNICQDDLSITFSFMSLDCLVVGGPREFNVTVTVRNDGEDSYRTQVTFFFPLDLSYRKVSTLQNQRSQRSWRLACESASSTEVSGALKSTSCSINHPIFPENSEVTFNITFDVDSKASLGNKLLLKANVTSENNMPRTNKTEFQLELPVKYAVYMVVTSHGVSTKYLNFTASENTSRVMQHQYQVSNLGQRSLPISLVFLVPVRLNQTVIWDRPQVTFSENLSSTCHTKERLPSHSDFLAELRKAPVVNCSIAVCQRIQCDIPFFGIQEEFNATLKGNLSFDWYIKTSHNHLLIVSTAEILFNDSVFTLLPGQGAFVRSQTETKVEPFEVPNPLPLIVGSSVGGLLLLALITAALYKLGFFKRQYKDMMSEGGPPGAEPQ

SEQ ID NO: 128 - protein, 1048 aa, Homo sapiens
MAFPPRRRLRLGPRGLPLLLSGLLLPLCRAFNLDVDSPAEYSGPEGSYFGFAVDFFVPSASSRMFLLVGAPKANTTQPGIVEGGQVLKCDWSSTRRCQPIEFDATGNRDYAKDDPLEFKSHQWFGASVRSKQDKILACAPLYHWRTEMKQEREPVGTCFLQDGTKTVEYAPCRSQDIDADGQGFCQGGFSIDFTKADRVLLGGPGSFYWQGQLISDQVAEIVSKYDPNVYSIKYNNQLATRTAQAIFDDSYLGYSVAVGDFNGDGIDDFVSGVPRAARTLGMVYIYDGKNMSSLYNFTGEQMAAYFGFSVAATDINGDDYADVFIGAPLFMDRGSDGKLQEVGQVSVSLQRASGDFQTTKLNGFEVFARFGSAIAPLGDLDQDGFNDIAIAAPYGGEDKKGIVYIFNGRSTGLNAVPSQILEGQWAARSMPPSFGYSMKGATDIDKNGYPDLIVGAFGVDRAILYRARPVITVNAGLEVYPSILNQDNKTCSLPGTALKVSCFNVRFCLKADGKGVLPRKLNFQVELLLDKLKQKGAIRRALFLYSRSPSHSKNMTISRGGLMQCEELIAYLRDESEFRDKLTPITIFMEYRLDYRTAADTTGLQPILNQFTPANISRQAHILLDCGEDNVCKPKLEVSVDSDQKKIYIGDDNPLTLIVKAQNQGEGAYEAELIVSIPLQADFIGVVRNNEALARLSCAFKTENQTRQVVCDLGNPMKAGTQLLAGLRFSVHQQSEMDTSVKFDLQIQSSNLFDKVSPVVSHKVDLAVLAAVEIRGVSSPDHIFLPIPNWEHKENPETEEDVGPVVQHIYELRNNGPSSFSKAMLHLQWPYKYNNNTLLYILHYDIDGPMNCTSDMEINPLRIKISSLQTTEKNDTVAGQGERDHLITKRDLALSEGDIHTLGCGVAQCLKIVCQVGRLDRGKSAILYVKSLLWTETFMNKENQNHSYSLKSSASFNVIEFPYKNLPIEDITNSTLVTTNVTWGIQPAPMPVPVWVIILAVLAGLLLLAVLVFVMYRMGFFKRVRPPQEEQEREQLQPHENGEGNSET

SEQ ID NO: 129 - protein, 1163 aa, Homo sapiens
MTRTRAALLLFTALATSLGFNLDTEELTAFRVDSAGFGDSVVQYANSWVVVGAPQKITAANQTGGLYQCGYSTGACEPIGLQVPPEAVNMSLGLSLASTTSPSQLLACGPTVHHECGRNMYLTGLCFLLGPTQLTQRLPVSRQECPRQEQDIVFLIDGSGSISSRNFATMMNFVRAVISQFQRPSTQFSLMQFSNKFQTHFTFEEFRRSSNPLSLLASVHQLQGFTYTATAIQNVVHRLFHASYGARRDAAKILIVITDGKKEGDSLDYKDVIPMADAAGIIRYAIGVGLAFQNRNSWKELNDIASKPSQEHIFKVEDFDALKDIQNQLKEKIFAIEGTETTSSSSFELEMAQEGFSAVFTPDGPVLGAVGSFTWSGGAFLYPPNMSPTFINMSQENVDMRDSYLGYSTELALWKGVQSLVLGAPRYQHTGKAVIFTQVSRQWRMKAEVTGTQIGSYFGASLCSVDVDSDGSTDLVLIGAPHYYEQTRGGQVSVCPLPRGWRRWWCDAVLYGEQGHPWGRFGAALTVLGDVNGDKLTDVVIGAPGEEENRGAVYLFHGVLGPSISPSHSQRIAGSQLSSRLQYFGQALSGGQDLTQDGLVDLAVGARGQVLLLRTRPVLWVGVSMQFIPAEIPRSAFECREQVVSEQTLVQSNICLYIDKRSKNLLGSRDLQSSVTLDLALDPGRLSPRATFQETKNRSLSRVRVLGLKAHCENFNLLLPSCVEDSVTPITLRLNFTLVGKPLLAFRNLRPMLAADAQRYFTASLPFEKNCGADHICQDNLGISFSFPGLKSLLVGSNLELNAEVMVWNDGEDSYGTTITFSHPAGLSYRYVAEGQKQGQLRSLHLTCDSAPVGSQGTWSTSCRINHLIFRGGAQITFLATFDVSPKAVLGDRLLLTANVSSENNTPRTSKTTFQLELPVKYAVYTVVSSHEQFTKYLNFSESEEKESHVAMHRYQVNNLGQRDLPVSINFWVPVELNQEAVWMDVEVSHPQNPSLRCSSEKIAPPASDFLAHIQKNPVLDCSIAGCLRFRCDVPSFSVQEELDFTLKGNLSFGWVRQILQKKVSVVSVAEITFDTSVYSQLPGQEAFMRAQTTTVLEKYKVHNPTPLIVGSSIGGLLLLALITAVLYKVGFFKRQYKEMMEEANGQIAPENGTQTPSPPSEK

SEQ ID NO: 130 - protein, 801 aa, Homo sapiens
MNLQPIFWIGLISSVCCVFAQTDENRCLKANAKSCGECIQAGPNCGWCTNSTFLQEGMPTSARCDDLEALKKKGCPPDDIENPRGSKDIKKNKNVTNRSKGTAEKLKPEDITQIQPQQLVLRLRSGEPQTFTLKFKRAEDYPIDLYYLMDLSYSMKDDLENVKSLGTDLMNEMRRITSDFRIGFGSFVEKTVMPYISTTPAKLRNPCTSEQNCTSPFSYKNVLSLTNKGEVFNELVGKQRISGNLDSPEGGFDAIMQVAVCGSLIGWRNVTRLLVFSTDAGFHFAGDGKLGGIVLPNDGQCHLENNMYTMSHYYDYPSIAHLVQKLSENNIQTIFAVTEEFQPVYKELKNLIPKSAVGTLSANSSNVIQLIIDAYNSLSSEVILENGKLSEGVTISYKSYCKNGVNGTGENGRKCSNISIGDEVQFEISITSNKCPKKDSDSFKIRPLGFTEEVEVILQYICECECQSEGIPESPKCHEGNGTFECGACRCNEGRVGRHCECSTDEVNSEDMDAYCRKENSSEICSNNGECVCGQCVCRKRDNTNEIYSGKFCECDNFNCDRSNGLICGGNGVCKCRVCECNPNYTGSACDCSLDTSTCEASNGQICNGRGICECGVCKCTDPKFQGQTCEMCQTCLGVCAEHKECVQCRAFNKGEKKDTCTQECSYFNITKVESRDKLPQPVQPDPVSHCKEKDVDDCWFYFTYSVNGNNEVMVHVVENPECPTGPDIIPIVAGVVAGIVLIGLALLLIWKLLMIIHDRREFAKFEKEKMNAKWDTQENPIYKSPINNFKNPNYGRKAGL

SEQ ID NO: 131 - protein, 769 aa, Homo sapiens
MLGLRPPLLALVGLLSLGCVLSQECTKFKVSSCRECIESGPGCTWCQKLNFTGPGDPDSIRCDTRPQLLMRGCAADDIMDPTSLAETQEDHNGGQKQLSPQKVTLYLRPGQAAAFNVTFRRAKGYPIDLYYLMDLSYSMLDDLRNVKKLGGDLLRALNEITESGRIGFGSFVDKTVLPFVNTHPDKLRNPCPNKEKECQPPFAFRHVLKLTNNSNQFQTEVGKQLISGNLDAPEGGLDAMMQVAACPEEIGWRNVTRLLVFATDDGFHFAGDGKLGAILTPNDGRCHLEDNLYKRSNEFDYPSVGQLAHKLAENNIQPIFAVTSRMVKTYEKLTEIIPKSAVGELSEDSSNVVQLIKNAYNKLSSRVFLDHNALPDTLKVTYDSFCSNGVTHRNQPRGDCDGVQINVPITFQVKVTATECIQEQSFVIRALGFTDIVTVQVLPQCECRCRDQSRDRSLCHGKGFLECGICRCDTGYIGKNCECQTQGRSSQELEGSCRKDNNSIICSGLGDCVCGQCLCHTSDVPGKLIYGQYCECDTINCERYNGQVCGGPGRGLCFCGKCRCHPGFEGSACQCERTTEGCLNPRRVECSGRGRCRCNVCECHSGYQLPLCQECPGCPSPCGKYISCAECLKFEKGPFGKNCSAACPGLQLSNNPVKGRTCKERDSEGCWVAYTLEQQDGMDRYLIYVDESRECVAGPNIAAIVGGTVAGIVLIGILLLVIWKALIHLSDLREYRRFEKEKLKSQWNNDNPLFKSATTTVMNPKFAES

SEQ ID NO: 132 - protein, 788 aa, Homo sapiens
MRARPRPRPLWATVLALGALAGVGVGGPNICTTRGVSSCQQCLAVSPMCAWCSDEALPLGSPRCDLKENLLKDNCAPESIEFPVSEARVLEDRPLSDKGSGDSSQVTQVSPQRIALRLRPDDSKNFSIQVRQVEDYPVDIYYLMDLSYSMKDDLWSIQNLGTKLATQMRKLTSNLRIGFGAFVDKPVSPYMYISPPEALENPCYDMKTTCLPMFGYKHVLTLTDQVTRFNEEVKKQSVSRNRDAPEGGFDAIMQATVCDEKIGWRNDASHLLVFTTDAKTHIALDGRLAGIVQPNDGQCHVGSDNHYSASTTMDYPSLGLMTEKLSQKNINLIFAVTENVVNLYQNYSELIPGTTVGVLSMDSSNVLQLIVDAYGKIRSKVELEVRDLPEELSLSFNATCLNNEVIPGLKSCMGLKIGDTVSFSIEAKVRGCPQEKEKSFTIKPVGFKDSLIVQVTFDCDCACQAQAEPNSHRCNNGNGTFECGVCRCGPGWLGSQCECSEEDYRPSQQDECSPREGQPVCSQRGECLCGQCVCHSSDFGKITGKYCECDDFSCVRYKGEMCSGHGQCSCGDCLCDSDWTGYYCNCTTRTDTCMSSNGLLCSGRGKCECGSCVCIQPGSYGDTCEKCPTCPDACTFKKECVECKKFDRGALHDENTCNRYCRDEIESVKELKDTGKDAVNCTYKNEDDCVVRFQYYEDSSGKSILYVVEEPECPKGPDILVVLLSVMGAILLIGLAALLIWKLLITIHDRKEFAKFEEERARAKWDTANNPLYKEATSTFTNITYRGT

SEQ ID NO: 133 - protein, 1822 aa, Homo sapiens
MAGPRPSPWARLLLAALISVSLSGTLANRCKKAPVKSCTECVRVDKDCAYCTDEMFRDRRCNTQAELLAAGCQRESIVVMESSFQITEETQIDTTLRRSQMSPQGLRVRLRPGEERHFELEVFEPLESPVDLYILMDFSNSMSDDLDNLKKMGQNLARVLSQLTSDYTIGFGKFVDKVSVPQTDMRPEKLKEPWPNSDPPFSFKNVISLTEDVDEFRNKLQGERISGNLDAPEGGFDAILQTAVCTRDIGWRPDSTHLLVFSTESAFHYEADGANVLAGIMSRNDERCHLDTTGTYTQYRTQDYPSVPTLVRLLAKHNIIPIFAVTNYSYSYYEKLHTYFPVSSLGVLQEDSSNIVELLEEAFNRIRSNLDIRALDSPRGLRTEVTSKMFQKTRTGSFHIRRGEVGIYQVQLRALEHVDGTHVCQLPEDQKGNIHLKPSFSDGLKMDAGIICDVCTCELQKEVRSARCSFNGDFVCGQCVCSEGWSGQTCNCSTGSLSDIQPCLREGEDKPCSGRGECQCGHCVCYGEGRYEGQFCEYDNFQCPRTSGFLCNDRGRCSMGQCVCEPGWTGPSCDCPLSNATCIDSNGGICNGRGHCECGRCHCHQQSLYTDTICEINYSAIHPGLCEDLRSCVQCQAWGTGEKKGRTCEECNFKVKMVDELKRAEEVVVRCSFRDEDDDCTYSYTMEGDGAPGPNSTVLVHKKKDCPPGSFWWLIPLLLLLLPLLALLLLLCWKYCACCKACLALLPCCNRGHMVGFKEDHYMLRENLMASDHLDTPMLRSGNLKGRDVVRWKVTNNMQRPGFATHAASINPTELVPYGLSLRLARLCTENLLKPDTRECAQLRQEVEENLNEVYRQISGVHKLQQTKFRQQPNAGKKQDHTIVDTVLMAPRSAKPALLKLTEKQVEQRAFHDLKVAPGYYTLTADQDARGMVEFQEGVELVDVRVPLFIRPEDDDEKQLLVEAIDVPAGTATLGRRLVNITIIKEQARDVVSFEQPEFSVSRGDQVARIPVIRRVLDGGKSQVSYRTQDGTAQGNRDYIPVEGELLFQPGEAWKELQVKLLELQEVDSLLRGRQVRRFHVQLSNPKFGAHLGQPHSTTIIIRDPDELDRSFTSQMLSSQPPPHGDLGAPQNPNAKAAGSRKIHFNWLPPSGKPMGYRVKYWIQGDSESEAHLLDSKVPSVELTNLYPYCDYEMKVCAYGAQGEGPYSSLVSCRTHQEVPSEPGRLAFNVVSSTVTQLSWAEPAETNGEITAYEVCYGLVNDDNRPIGPMKKVLVDNPKNRMLLIENLRESQPYRYTVKARNGAGWGPEREAIINLATQPKRPMSIPIIPDIPIVDAQSGEDYDSFLMYSDDVLRSPSGSQRPSVSDDTGCGWKFEPLLGEELDLRRVTWRLPPELIPRLSASSGRSSDAEAPHGPPDDGGAGGKGGSLPRSATPGPPGEHLVNGRMDFAFPGSTNSLHRMTTTSAAAYGTHLSPHVPHRVLSTSSTLTRDYNSLTRSEHSHSTTLPRDYSTLTSVSSHDSRLTAGVPDTPTRLVFSALGPTSLRVSWQEPRCERPLQGYSVEYQLLNGGELHRLNIPNPAQTSVVVEDLLPNHSYVFRVRAQSQEGWGREREGVITIESQVHPQSPLCPLPGSAFTLSTPSAPGPLVFTALSPDSLQLSWERPRRPNGDIVGYLVTCEMAQGGGPATAFRVDGDSPESRLTVPGLSENVPYKFKVQARTTEGFGPEREGIITIESQDGGPFPQLGSRAGLFQHPLQSEYSSITTTHTSATEPFLVDGLTLGAQHLEAGGSLTRHVTQEFVSRTLTTSGTLSTHMDQQFFQT

SEQ ID NO: 134 - protein, 799 aa, Homo sapiens
MPRAPAPLYACLLGLCALLPRLAGLNICTSGSATSCEECLLIHPKCAWCSKEDFGSPRSITSRCDLRANLVKNGCGGEIESPASSFHVLRSLPLSSKGSGSAGWDVIQMTPQEIAVNLRPGDKTTFQLQVRQVEDYPVDLYYLMDLSLSMKDDLDNIRSLGTKLAEEMRKLTSNFRLGFGSFVDKDISPFSYTAPRYQTNPCIGYKLFPNCVPSFGFRHLLPLTDRVDSFNEEVRKQRVSRNRDAPEGGFDAVLQAAVCKEKIGWRKDALHLLVFTTDDVPHIALDGKLGGLVQPHDGQCHLNEANEYTASNQMDYPSLALLGEKLAENNINLIFAVTKNHYMLYKNFTALIPGTTVEILDGDSKNIIQLIINAYNSIRSKVELSVWDQPEDLNLFFTATCQDGVSYPGQRKCEGLKIGDTASFEVSLEARSCPSRHTEHVFALRPVGFRDSLEVGVTYNCTCGCSVGLEPNSARCNGSGTYVCGLCECSPGYLGTRCECQDGENQSVYQNLCREAEGKPLCSGRGDCSCNQCSCFESEFGKIYGPFCECDNFSCARNKGVLCSGHGECHCGECKCHAGYIGDNCNCSTDISTCRGRDGQICSERGHCLCGQCQCTEPGAFGEMCEKCPTCPDACSTKRDCVECLLLHSGKPDNQTCHSLCRDEVITWVDTIVKDDQEAVLCFYKTAKDCVMMFTYVELPSGKSNLTVLREPECGNTPNAMTILLAVVGSILLVGLALLAIWKLLVTIHDRREFAKFQSERSRARYEMASNPLYRKPISTHTVDFTFNKFNKSYNGTVD

SEQ ID NO: 135 - protein, 788 aa, Homo sapiens
MGIELLCLFFLFLGRNDHVQGGCALGGAETCEDCLLIGPQCAWCAQENFTHPSGVGERCDTPANLLAKGCQLNFIENPVSQVEILKNKPLSVGRQKNSSDIVQIAPQSLILKLRPGGAQTLQVHVRQTEDYPVDLYYLMDLSASMDDDLNTIKELGSRLSKEMSKLTSNFRLGFGSFVEKPVSPFVKTTPEEIANPCSSIPYFCLPTFGFKHILPLTNDAERFNEIVKNQKISANIDTPEGGFDAIMQAAVCKEKIGWRNDSLHLLVFVSDADSHFGMDSKLAGIVIPNDGLCHLDSKNEYSMSTVLEYPTIGQLIDKLVQNNVLLIFAVTQEQVHLYENYAKLIPGATVGLLQKDSGNILQLIISAYEELRSEVELEVLGDTEGLNLSFTAICNNGTLFQHQKKCSHMKVGDTASFSVTVNIPHCERRSRHIIIKPVGLGDALELLVSPECNCDCQKEVEVNSSKCHHGNGSFQCGVCACHPGHMGPRCECGEDMLSTDSCKEAPDHPSCSGRGDCYCGQCICHLSPYGNIYGPYCQCDNFSCVRHKGLLCGGNGDCDCGECVCRSGWTGEYCNCTTSTDSCVSEDGVLCSGRGDCVCGKCVCTNPGASGPTCERCPTCGDPCNSKRSCIECHLSAAGQAREECVDKCKLAGATISEEEDFSKDGSVSCSLQGENECLITFLITTDNEGKTIIHSINEKDCPKPPNIPMIMLGVSLAILLIGVVLLCIWKLLVSFHDRKEVAKFEAERSKAKWQTGTNPLYRGSTSTFKNVTYKHREKQKVDLSTDC

SEQ ID NO: 136 - protein, 798 aa, Homo sapiens
MVALPMVLVLLLVLSRGESELDAKIPSTGDATEWRNPHLSMLGSCQPAPSCQKCILSHPSCAWCKQLNFTASGEAEARRCARREELLARGCPLEELEEPRGQQEVLQDQPLSQGARGEGATQLAPQRVRVTLRPGEPQQLQVRFLRAEGYPVDLYYLMDLSYSMKDDLERVRQLGHALLVRLQEVTHSVRIGFGSFVDKTVLPFVSTVPSKLRHPCPTRLERCQSPFSFHHVLSLTGDAQAFEREVGRQSVSGNLDSPEGGFDAILQAALCQEQIGWRNVSRLLVFTSDDTFHTAGDGKLGGIFMPSDGHCHLDSNGLYSRSTEFDYPSVGQVAQALSAANIQPIFAVTSAALPVYQELSKLIPKSAVGELSEDSSNVVQLIMDAYNSLSSTVTLEHSSLPPGVHISYESQCEGPEKREGKAEDRGQCNHVRINQTVTFWVSLQATHCLPEPHLLRLRALGFSEELIVELHTLCDCNCSDTQPQAPHCSDGQGHLQCGVCSCAPGRLGRLCECSVAELSSPDLESGCRAPNGTGPLCSGKGHCQCGRCSCSGQSSGHLCECDDASCERHEGILCGGFGRCQCGVCHCHANRTGRACECSGDMDSCISPEGGLCSGHGRCKCNRCQCLDGYYGALCDQCPGCKTPCERHRDCAECGAFRTGPLATNCSTACAHTNVTLALAPILDDGWCKERTLDNQLFFFLVEDDARGTVVLRVRPQEKGADHTQAIVLGCVGGIVAVGLGLVLAYRLSVEIYDRREYSRFEKEQQQLNWKQDSNPLYKSAITTTINPRFQEADSPTL

SEQ ID NO: 137 - protein, 769 aa, Homo sapiens
MCGSALAFFTAAFVCLQNDRRGPASFLWAAWVFSLVLGLGQGEDNRCASSNAASCARCLALGPECGWCVQEDFISGGSRSERCDIVSNLISKGCSVDSIEYPSVHVIIPTENEINTQVTPGEVSIQLRPGAEANFMLKVHPLKKYPVDLYYLVDVSASMHNNIEKLNSVGNDLSRKMAFFSRDFRLGFGSYVDKTVSPYISIHPERIHNQCSDYNLDCMPPHGYIHVLSLTENITEFEKAVHRQKISGNIDTPEGGFDAMLQAAVCESHIGWRKEAKRLLLVMTDQTSHLALDSKLAGIVVPNDGNCHLKNNVYVKSTTMEHPSLGQLSEKLIDNNINVIFAVQGKQFHWYKDLLPLLPGTIAGEIESKAANLNNLVVEAYQKLISEVKVQVENQVQGIYFNITAICPDGSRKPGMEGCRNVTSNDEVLFNVTVTMKKCDVTGGKNYAIIKPIGFNETAKIHIHRNCSCQCEDNRGPKGKCVDETFLDSKCFQCDENKCHFDEDQFSSESCKSHKDQPVCSGRGVCVCGKCSCHKIKLGKVYGKYCEKDDFSCPYHHGNLCAGHGECEAGRCQCFSGWEGDRCQCPSAAAQHCVNSKGQVCSGRGTCVCGRCECTDPRSIGRFCEHCPTCYTACKENWNCMQCLHPHNLSQAILDQCKTSCALMEQQHYVDQTSECFSSPSYLRIFFIIFIVTFLIGLLKVLIIRQVILQWNSNKIKSSSDYRVSASKKDKLILQSVCTRAVTYRREKPEEIKMDISKLNAHETFRCNF

SEQ ID NO: 138 - protein, 503 aa, Homo sapiens
MTLGSPRKGLLMLLMALVTQGDPVKPSRGPLVTCTCESPHCKGPTCRGAWCTVVLVREEGRHPQEHRGCGNLHRELCRGRPTEFVNHYCCDSHLCNHNVSLVLEATQPPSEQPGTDGQLALILGPVLALLALVALGVLGLWHVRRRQEKQRGLHSELGESSLILKASEQGDSMLGDLLDSDCTTGSGSGLPFLVQRTVARQVALVECVGKGRYGEVWRGLWHGESVAVKIFSSRDEQSWFRETEIYNTVLLRHDNILGFIASDMTSRNSSTQLWLITHYHEHGSLYDFLQRQTLEPHLALRLAVSAACGLAHLHVEIFGTQGKPAIAHRDFKSRNVLVKSNLQCCIADLGLAVMHSQGSDYLDIGNNPRVGTKRYMAPEVLDEQIRTDCFESYKWTDIWAFGLVLWEIARRTIVNGIVEDYRPPFYDVVPNDPSFEDMKKVVCVDQQTPTIPNRLAADPVLSGLAQMMRECWYPNPSARLTALRIKKTLQKISNSPEKPKVIQ

SEQ ID NO: 139 - protein, 509 aa, Homo sapiens
MVDGVMILPVLIMIALPSPSMEDEKPKVNPKLYMCVCEGLSCGNEDHCEGQQCFSSLSINDGFHVYQKGCFQVYEQGKMTCKTPPSPGQAVECCQGDWCNRNITAQLPTKGKSFPGTQNFHLEVGLIILSVVFAVCLLACLLGVALRKFKRRNQERLNPRDVEYGTIEGLITTNVGDSTLADLLDHSCTSGSGSGLPFLVQRTVARQITLLECVGKGRYGEVWRGSWQGENVAVKIFSSRDEKSWFRETELYNTVMLRHENILGFIASDMTSRHSSTQLWLITHYHEMGSLYDYLQLTTLDTVSCLRIVLSIASGLAHLHIEIFGTQGKPAIAHRDLKSKNILVKKNGQCCIADLGLAVMHSQSTNQLDVGNNPRVGTKRYMAPEVLDETIQVDCFDSYKRVDIWAFGLVLWEVARRMVSNGIVEDYKPPFYDVVPNDPSFEDMRKVVCVDQQRPNIPNRWFSDPTLTSLAKLMKECWYQNPSARLTALRIKKTLTKIDNSLDKLKTDC

SEQ ID NO: 140 - protein, 532 aa, Homo sapiens
MPQLYIYIRLLGAYLFIISRVQGQNLDSMLHGTGMKSDSDQKKSENGVTLAPEDTLPFLKCYCSGHCPDDAINNTCITNGHCFAIIEEDDQGETTLASGCMKYEGSDFQCKDSPKAQLRRTIECCRTNLCNQYLQPTLPPVVIGPFFDGSIRWLVLLISMAVCIIAMIIFSSCFCYKHYCKSISSRRRYNRDLEQDEAFIPVGESLKDLIDQSQSSGSGSGLPLLVQRTIAKQIQMVRQVGKGRYGEVWMGKWRGEKVAVKVFFTTEEASWFRETEIYQTVLMRHENILGFIAADIKGTGSWTQLYLITDYHENGSLYDFLKCATLDTRALLKLAYSAACGLCHLHTEIYGTQGKPAIAHRDLKSKNILIKKNGSCCIADLGLAVKFNSDTNEVDVPLNTRVGTKRYMAPEVLDESLNKNHFQPYIMADIYSFGLIIWEMARRCITGGIVEEYQLPYYNMVPSDPSYEDMREVVCVKRLRPIVSNRWNSDECLRAVLKLMSECWAHNPASRLTALRIKKTLAKMVESQDVKI

SEQ ID NO: 141 - protein, 546 aa, Homo sapiens
MAESAGASSFFPLVVLLLAGSGGSGPRGVQALLCACTSCLQANYTCETDGACMVSIFNLDGMEHHVRTCIPKVELVPAGKPFYCLSSEDLRNTHCCYTDYCNRIDLRVPSGHLKEPEHPSMWGPVELVGIIAGPVFLLFLIIIIVFLVINYHQRVYHNRQRLDMEDPSCEMCLSKDKTLQDLVYDLSTSGSGSGLPLFVQRTVARTIVLQEIIGKGRFGEVWRGRWRGGDVAVKIFSSREERSWFREAEIYQTVMLRHENILGFIAADNKADCSFLTLPWEVVMVSAAPKLRSLRLQYKGGRGRARFLFPLNNGTWTQLWLVSDYHEHGSLFDYLNRYTVTIEGMIKLALSAASGLAHLHMEIVGTQGKPGIAHRDLKSKNILVKKNGMCAIADLGLAVRHDAVTDTIDIAPNQRVGTKRYMAPEVLDETINMKHFDSFKCADIYALGLVYWEIARRCNSGGVHEEYQLPYYDLVPSDPSIEEMRKVVCDQKLRPNIPNWWQSYEALRVMGKMMRECWYANGAARLTALRIKKTLSQLSVQEDVKI

SEQ ID NO: 142 - protein, 503 aa, Homo sapiens
MEAAVAAPRPRLLLLVLAAAAAAAAALLPGATALQCFCHLCTKDNFTCVTDGLCFVSVTETTDKVIHNSMCIAEIDLIPRDRPFVCAPSSKTGSVTTTYCCNQDHCNKIELPTTVKSSPGLGPVELAAVIAGPVCFVCISLMLMVYICHNRTVIHHRVPNEEDPSLDRPFISEGTTLKDLIYDMTTSGSGSGLPLLVQRTIARTIVLQESIGKGRFGEVWRGKWRGEEVAVKIFSSREERSWFREAEIYQTVMLRHENILGFIAADNKDNGTWTQLWLVSDYHEHGSLFDYLNRYTVTVEGMIKLALSTASGLAHLHMEIVGTQGKPAIAHRDLKSKNILVKKNGTCCIADLGLAVRHDSATDTIDIAPNHRVGTKRYMAPEVLDDSINMKHFESFKRADIYAMGLVFWEIARRCSIGGIHEDYQLPYYDLVPSDPSVEEMRKVVCEQKLRPNIPNRWQSCEALRVMAKIMRECWYANGAARLTALRIKKTLSQLSQQEGIKM

SEQ ID NO: 143 - protein, 532 aa, Homo sapiens
MGWLEELNWQLHIFLLILLSMHTRANFLDNMLLRSAGKLNVGTKKEDGESTAPTPRPKVLRCKCHHHCPEDSVNNICSTDGYCFTMIEEDDSGLPVVTSGCLGLEGSDFQCRDTPIPHQRRSIECCTERNECNKDLHPTLPPLKNRDFVDGPIHHRALLISVTVCSLLLVLIILFCYFRYKRQETRPRYSIGLEQDETYIPPGESLRDLIEQSQSSGSGSGLPLLVQRTIAKQIQMVKQIGKGRYGEVWMGKWRGEKVAVKVFFTTEEASWFRETEIYQTVLMRHENILGFIAADIKGTGSWTQLYLITDYHENGSLYDYLKSTTLDAKSMLKLAYSSVSGLCHLHTEIFSTQGKPAIAHRDLKSKNILVKKNGTCCIADLGLAVKFISDTNEVDIPPNTRVGTKRYMPPEVLDESLNRNHFQSYIMADMYSFGLILWEVARRCVSGGIVEEYQLPYHDLVPSDPSYEDMREIVCIKKLRPSFPNRWSSDECLRQMGKLMTECWAHNPASRLTALRVKKTLAKMSESQDIKL

SEQ ID NO: 144 - protein, 493 aa, Homo sapiens
MTRALCSALRQALLLLAAAAELSPGLKCVCLLCDSSNFTCQTEGACWASVMLTNGKEQVIKSCVSLPELNAQVFCHSSNNVTKTECCFTDFCNNITLHLPTASPNAPKLGPMELAIIITVPVCLLSIAAMLTVWACQGRQCSYRKKKRPNVEEPLSECNLVNAGKTLKDLIYDVTASGSGSGLPLLVQRTIARTIVLQEIVGKGRFGEVWHGRWCGEDVAVKIFSSRDERSWFREAEIYQTVMLRHENILGFIAADNKDNGTWTQLWLVSEYHEQGSLYDYLNRNIVTVAGMIKLALSIASGLAHLHMEIVGTQGKPAIAHRDIKSKNILVKKCETCAIADLGLAVKHDSILNTIDIPQNPKVGTKRYMAPEMLDDTMNVNIFESFKRADIYSVGLVYWEIARRCSVGGIVEEYQLPYYDMVPSDPSIEEMRKVVCDQKFRPSIPNQWQSCEALRVMGRIMRECWYANGAARLTALRIKKTISQLCVKEDCKA

SEQ ID NO: 145 - protein, 592 aa, Homo sapiens
MGRGLLRGLWPLHIVLWTRIASTIPPHVQKSDVEMEAQKDEIICPSCNRTAHPLRHINNDMIVTDNNGAVKFPQLCKFCDVRFSTCDNQKSCMSNCSITSICEKPQEVCVAVWRKNDENITLETVCHDPKLPYHDFILEDAASPKCIMKEKKKPGETFFMCSCSSDECNDNIIFSEEYNTSNPDLLLVIFQVTGISLLPPLGVAISVIIIFYCYRVNRQQKLSSTWETGKTRKLMEFSEHCAIILEDDRSDISSTCANNINHNTELLPIELDTLVGKGRFAEVYKAKLKQNTSEQFETVAVKIFPYEEYASWKTEKDIFSDINLKHENILQFLTAEERKTELGKQYWLITAFHAKGNLQEYLTRHVISWEDLRKLGSSLARGIAHLHSDHTPCGRPKMPIVHRDLKSSNILVKNDLTCCLCDFGLSLRLDPTLSVDDLANSGQVGTARYMAPEVLESRMNLENVESFKQTDVYSMALVLWEMTSRCNAVGEVKDYEPPFGSKVREHPCVESMKDNVLRDRGRPEIPSFWLNHQGIQMVCETLTECWDHDPEARLTAQCVAERFSELEHLDRLSGRSCSEEKIPEDGSLNTTK

SEQ ID NO: 146 - protein, 1038 aa, Homo sapiens
MTSSLQRPWRVPWLPWTILLVSTAAASQNQERLCAFKDPYQQDLGIGESRISHENGTILCSKGSTCYGLWEKSKGDINLVKQGCWSHIGDPQECHYEECVVTTTPPSIQNGTYRFCCCSTDLCNVNFTENFPPPDTTPLSPPHSFNRDETIIIALASVSVLAVLIVALCFGYRMLTGDRKQGLHSMNMMEAAASEPSLDLDNLKLLELIGRGRYGAVYKGSLDERPVAVKVFSFANRQNFINEKNIYRVPLMEHDNIARFIVGDERVTADGRMEYLLVMEYYPNGSLCKYLSLHTSDWVSSCRLAHSVTRGLAYLHTELPRGDHYKPAISHRDLNSRNVLVKNDGTCVISDFGLSMRLTGNRLVRPGEEDNAAISEVGTIRYMAPEVLEGAVNLRDCESALKQVDMYALGLIYWEIFMRCTDLFPGESVPEYQMAFQTEVGNHPTFEDMQVLVSREKQRPKFPEAWKENSLAVRSLKETIEDCWDQDAEARLTAQCAEERMAELMMIWERNKSVSPTVNPMSTAMQNERNLSHNRRVPKIGPYPDYSSSSYIEDSIHHTDSIVKNISSEHSMSSTPLTIGEKNRNSINYERQQAQARIPSPETSVTSLSTNTTTTNTTGLTPSTGMTTISEMPYPDETNLHTTNVAQSIGPTPVCLQLTEEDLETNKLDPKEVDKNLKESSDENLMEHSLKQFSGPDPLSSTSSSLLYPLIKLAVEATGQQDFTQTANGQACLIPDVLPTQIYPLPKQQNLPKRPTSLPLNTKNSTKEPRLKFGSKHKSNLKQVETGVAKMNTINAAEPHVVTVTMNGVAGRNHSVNSHAATTQYANGTVLSGQTTNIVTHRAQEMLQNQFIGEDTRLNINSSPDEHEPLLRREQQAGHDEGVLDRLVDRRERPLEGGRTNSNNNNSNPCSEQDVLAQGVPSTAADPGPSKPRRAQRPNSLDLSATNVLDGSSIQIGESTQDGKSGSGEKIKKRVKTPYSLKRWRPSTWVISTESLDCEVNNNGSNRAVHSKSSTAVYLAEGGTATTMVSKDIGMNCL

SEQ ID NO: 147 - protein, 851 aa, Homo sapiens
MTSHYVIAIFALMSSCLATAGPEPGALCELSPVSASHPVQALMESFTVLSGCASRGTTGLPQEVHVLNLRTAGQGPGQLQREVTLHLNPISSVHIHHKSVVFLLNSPHPLVWHLKTERLATGVSRLFLVSEGSVVQFSSANFSLTAETEERNFPHGNEHLLNWARKEYGAVTSFTELKIARNIYIKVGEDQVFPPKCNIGKNFLSLNYLAEYLQPKAAEGCVMSSQPQNEEVHIIELITPNSNPYSAFQVDITIDIRPSQEDLEVVKNLILILKCKKSVNWVIKSFDVKGSLKIIAPNSIGFGKESERSMTMTKSIRDDIPSTQGNLVKWALDNGYSPITSYTMAPVANRFHLRLENNAEEMGDEEVHTIPPELRILLDPGALPALQNPPIRGGEGQNGGLPFPFPDISRRVWNEEGEDGLPRPKDPVIPSIQLFPGLREPEEVQGSVDIALSVKCDNEKMIVAVEKDSFQASGYSGMDVTLLDPTCKAKMNGTHFVLESPLNGCGTRPRWSALDGVVYYNSIVIQVPALGDSSGWPDGYEDLESGDNGFPGDMDEGDASLFTRPEIVVFNCSLQQVRNPSSFQEQPHGNITFNMELYNTDLFLVPSQGVFSVPENGHVYVEVSVTKAEQELGFAIQTCFISPYSNPDRMSHYTIIENICPKDESVKFYSPKRVHFPIPQADMDKKRFSFVFKPVFNTSLLFLQCELTLCTKMEKHPQKLPKCVPPDEACTSLDASIIWAMMQNKKTFTKPLAVIHHEAESKEKGPSMKEPNPISPPIFHGLDTLTVMGIAFAAFVIGALLTGALWYIYSHTGETAGRQQVPTSPPASENSSAAHSIGSTQSTPCSSSSTA

SEQ ID NO: 148 - protein, 658 aa, Homo sapiens
MDRGTLPLAVALLLASCSLSPTSLAETVHCDLQPVGPERGEVTYTTSQVSKGCVAQAPNAILEVHVLFLEFPTGPSQLELTLQASKQNGTWPREVLLVLSVNSSVFLHLQALGIPLHLAYNSSLVTFQEPPGVNTTELPSFPKTQILEWAAERGPITSAAELNDPQSILLRLGQAQGSLSFCMLEASQDMGRTLEWRPRTPALVRGCHLEGVAGHKEAHILRVLPGHSAGPRTVTVKVELSCAPGDLDAVLILQGPPYVSWLIDANHNMQIWTTGEYSFKIFPEKNIRGFKLPDTPQGLLGEARMLNASIVASFVELPLASIVSLHASSCGGRLQTSPAPIQTTPPKDTCSPELLMSLIQTKCADDAMTLVLKKELVAHLKCTITGLTFWDPSCEAEDRGDKFVLRSAYSSCGMQVSASMISNEAVVNILSSSSPQRKKVHCLNMDSLSFQLGLYLSPHFLQASNTIEPGQQSFVQVRVSPSVSEFLLQLDSCHLDLGPEGGTVELIQGRAAKGNCVSLLSPSPEGDPRFSFLLHFYTVPIPKTGTLSCTVALRPKTGSQDQEVHRTVFMRLNIISPDLSGCTSKGLVLPAVLGITFGAFLIGALLTAALWYIYSHTRSPSKREPVVAVAAPASSESSSTNHSIGSTQSTPCSTSSMA

SEQ ID NO: 149 - protein, 748 aa, Homo sapiens
MVLLRVLILLLSWAAGMGGQYGNPLNKYIRHYEGLSYNVDSLHQKHQRAKRAVSHEDQFLRLDFHAHGRHFNLRMKRDTSLFSDEFKVETSNKVLDYDTSHIYTGHIYGEEGSFSHGSVIDGRFEGFIQTRGGTFYVEPAERYIKDRTLPFHSVIYHEDDINYPHKYGPQGGCADHSVFERMRKYQMTGVEEVTQIPQEEHAANGPELLRKKRTTSAEKNTCQLYIQTDHLFFKYYGTREAVIAQISSHVKAIDTIYQTTDFSGIRNISFMVKRIRINTTADEKDPTNPFRFPNIGVEKFLELNSEQNHDDYCLAYVFTDRDFDDGVLGLAWVGAPSGSSGGICEKSKLYSDGKKKSLNTGIITVQNYGSHVPPKVSHITFAHEVGHNFGSPHDSGTECTPGESKNLGQKENGNYIMYARATSGDKLNNNKFSLCSIRNISQVLEKKRNNCFVESGQPICGNGMVEQGEECDCGYSDQCKDECCFDANQPEGRKCKLKPGKQCSPSQGPCCTAQCAFKSKSEKCRDDSDCAREGICNGFTALCPASDPKPNFTDCNRHTQVCINGQCAGSICEKYGLEECTCASSDGKDDKELCHVCCMKKMDPSTCASTGSVQWSRHFSGRTITLQPGSPCNDFRGYCDVFMRCRLVDADGPLARLKKAIFSPELYENIAEWIVAHWWAVLLMGIALIMLMAGFIKICSVHTPSSNPKLPPPKPLPGTLKRRRPPQPIQQPQRQRPRESYQMGHMRR

SEQ ID NO: 150 - protein, 824 aa, Homo sapiens
MRQSLLFLTSVVPFVLAPRPPDDPGFGPHQRLEKLDSLLSDYDILSLSNIQQHSVRKRDLQTSTHVETLLTFSALKRHFKLYLTSSTERFSQNFKVVVVDGKNESEYTVKWQDFFTGHVVGEPDSRVLAHIRDDDVIIRINTDGAEYNIEPLWRFVNDTKDKRMLVYKSEDIKNVSRLQSPKVCGYLKVDNEELLPKGLVDREPPEELVHRVKRRADPDPMKNTCKLLVVADHRFYRYMGRGEESTTTNYLIELIDRVDDIYRNTSWDNAGFKGYGIQIEQIRILKSPQEVKPGEKHYNMAKSYPNEEKDAWDVKMLLEQFSFDIAEEASKVCLAHLFTYQDFDMGTLGLAYVGSPRANSHGGVCPKAYYSPVGKKNIYLNSGLTSTKNYGKTILTKEADLVTTHELGHNFGAEHDPDGLAECAPNEDQGGKYVMYPIAVSGDHENNKMFSNCSKQSIYKTIESKAQECFQERSNKVCGNSRVDEGEECDPGIMYLNNDTCCNSDCTLKEGVQCSDRNSPCCKNCQFETAQKKCQEAINATCKGVSYCTGNSSECPPPGNAEDDTVCLDLGKCKDGKCIPFCEREQQLESCACNETDNSCKVCCRDLSGRCVPYVDAEQKNLFLRKGKPCTVGFCDMNGKCEKRVQDVIERFWDFIDQLSINTFGKFLADNIVGSVLVFSLIFWIPFSILVHCVDKKLDKQYESLSLFHPSNVEMLSSMDSASVRIIKPFPAPQTPGRLQPAPVIPSAPAAPKLDHQRMDTIQEDPSTDSHMDEDGFEKDPFPNSSTAAKSFEDLTDHPVTRSEKAASFKLQRQNRVDSKETEC

SEQ ID NO: 151 - protein, 2843 aa, Homo sapiens
MAAASYDQLLKQVEALKMENSNLRQELEDNSNHLTKLETEASNMKEVLKQLQGSIEDEAMASSGQIDLLERLKELNLDSSNFPGVKLRSKMSLRSYGSREGSVSSRSGECSPVPMGSFPRRGFVNGSRESTGYLEELEKERSLLLADLDKEEKEKDWYYAQLQNLTKRIDSLPLTENFSLQTDMTRRQLEYEARQIRVAMEEQLGTCQDMEKRAQRRIARIQQIEKDILRIRQLLQSQATEAERSSQNKHETGSHDAERQNEGQGVGEINMATSGNGQGSTTRMDHETASVLSSSSTHSAPRRLTSHLGTKVEMVYSLLSMLGTHDKDDMSRTLLAMSSSQDSCISMRQSGCLPLLIQLLHGNDKDSVLLGNSRGSKEARARASAALHNIIHSQPDDKRGRREIRVLHLLEQIRAYCETCWEWQEAHEPGMDQDKNPMPAPVEHQICPAVCVLMKLSFDEEHRHAMNELGGLQAIAELLQVDCEMYGLTNDHYSITLRRYAGMALTNLTFGDVANKATLCSMKGCMRALVAQLKSESEDLQQVIASVLRNLSWRADVNSKKTLREVGSVKALMECALEVKKESTLKSVLSALWNLSAHCTENKADICAVDGALAFLVGTLTYRSQTNTLAIIESGGGILRNVSSLIATNEDHRQILRENNCLQTLLQHLKSHSLTIVSNACGTLWNLSARNPKDQEALWDMGAVSMLKNLIHSKHKMIAMGSAAALRNLMANRPAKYKDANIMSPGSSLPSLHVRKQKALEAELDAQHLSETFDNIDNLSPKASHRSKQRHKQSLYGDYVFDTNRHDDNRSDNFNTGNMTVLSPYLNTTVLPSSSSSRGSLDSSRSEKDRSLERERGIGLGNYHPATENPGTSSKRGLQISTTAAQIAKVMEEVSAIHTSQEDRSSGSTTELHCVTDERNALRRSSAAHTHSNTYNFTKSENSNRTCSMPYAKLEYKRSSNDSLNSVSSSDGYGKRGQMKPSIESYSEDDESKFCSYGQYPADLAHKIHSANHMDDNDGELDTPINYSLKYSDEQLNSGRQSPSQNERWARPKHIIEDEIKQSEQRQSRNQSTTYPVYTESTDDKHLKFQPHFGQQECVSPYRSRGANGSETNRVGSNHGINQNVSQSLCQEDDYEDDKPTNYSERYSEEEQHEEEERPTNYSIKYNEEKRHVDQPIDYSLKYATDIPSSQKQSFSFSKSSSGQSSKTEHMSSSSENTSTPSSNAKRQNQLHPSSAQSRSGQPQKAATCKVSSINQETIQTYCVEDTPICFSRCSSLSSLSSAEDEIGCNQTTQEADSANTLQIAEIKEKIGTRSAEDPVSEVPAVSQHPRTKSSRLQGSSLSSESARHKAVEFSSGAKSPSKSGAQTPKSPPEHYVQETPLMFSRCTSVSSLDSFESRSIASSVQSEPCSGMVSGIISPSDLPDSPGQTMPPSRSKTPPPPPQTAQTKREVPKNKAPTAEKRESGPKQAAVNAAVQRVQVLPDADTLLHFATESTPDGFSCSSSLSALSLDEPFIQKDVELRIMPPVQENDNGNETESEQPKESNENQEKEAEKTIDSEKDLLDDSDDDDIEILEECIISAMPTKSSRKAKKPAQTASKLPPPVARKPSQLPVYKLLPSQNRLQPQKHVSFTPGDDMPRVYCVEGTPINFSTATSLSDLTIESPPNELAAGEGVRGGAQSGEFEKRDTIPTEGRSTDEAQGGKTSSVTIPELDDNKAEEGDILAECINSAMPKGKSHKPFRVKKIMDQVQQASASSSAPNKNQLDGKKKKPTSPVKPIPQNTEYRTRVRKNADSKNNLNAERVFSDNKDSKKQNLKNNSKVFNDKLPNNEDRVRGSFAFDSPHHYTPIEGTPYCFSRNDSLSSLDFDDDDVDLSREKAELRKAKENKESEAKVTSHTELTSNQQSANKTQAIAKQPINRGQPKPILQKQSTFPQSSKDIPDRGAATDEKLQNFAIENTPVCFSHNSSLSSLSDIDQENNNKENEPIKETEPPDSQGEPSKPQASGYAPKSFHVEDTPVCFSRNSSLSSLSIDSEDDLLQECISSAMPKKKKPSRLKGDNEKHSPRNMGGILGEDLTLDLKDIQRPDSEHGLSPDSENFDWKAIQEGANSIVSSLHQAAAAACLSRQASSDSDSILSLKSGISLGSPFHLTPDQEEKPFTSNKGPRILKPGEKSTLETKKIESESKGIKGGKKVYKSLITGKVRSNSEISGQMKQPLQANMPSISRGRTMIHIPGVRNSSSSTSPVSKKGPPLKTPASKSPSEGQTATTSPRGAKPSVKSELSPVARQTSQIGGSSKAPSRSGSRDSTPSRPAQQPLSRPIQSPGRNSISPGRNGISPPNKLSQLPRTSSPSTASTKSSGSGKMSYTSPGRQMSQQNLTKQTGLSKNASSIPRSESASKGLNQMNNGNGANKKVELSRMSSTKSSGSESDRSERPVLVRQSTFIKEAPSPTLRRKLEESASFESLSPSSRPASPTRSQAQTPVLSPSLPDMSLSTHSSVQAGGWRKLPPNLSPTIEYNDGRPAKRHDIARSHSESPSRLPINRSGTWKREHSKHSSSLPRVSTWRRTGSSSSILSASSESSEKAKSEDEKHVNSISGTKQSKENQVSAKGTWRKIKENEFSPTNSTSQTVSSGATNGAESKTLIYQMAPAVSKTEDVWVRIEDCPINNPRSGRSPTGNTPPVIDSVSEKANPNIKDSKDNQAKQNVGNGSVPMRTVGLENRLNSFIQVDAPDQKGTEIKPGQNNPVPVSETNESSIVERTPFSSSSSSKHSSPSGTVAARVTPFNYNPSPRKSSADSTSARPSQIPTPVNNNTKKRDSKTDSTESSGTQSPKRHSGSYLVTSV

SEQ ID NO: 152 - protein, 264 aa, Homo sapiens
MCHKNGFPQEGGITAAFLQKRKLRLSKNHRPARAKVTEHVRGTRPGRATAGPAASTRAAGSLFFDRWGNRGPAGCRGSSHLPQQLKFTTSDSCDRIKDEFQLLQAQYHSLKLECDKLASEKSEMQRHYVMYYEMSYGLNIEMHKQAEIVKRLNGICAQVLPYLSQEHQQQVLGAIERAKQVTAPELNSIIRQQLQAHQLSQLQALALPLTPLPVGLQPPSLPAVSAGTGLLSLSALGSQAHLSKEDKNGHDGDTHQEDDGEKSD

SEQ ID NO: 153 - protein, 862 aa, Homo sapiens
MNIQEQGFPLDLGASFTEDAPRPPVPGEEGELVSTDPRPASYSFCSGKGVGIKGETSTATPRRSDLDLGYEPEGSASPTPPYLKWAESLHSLLDDQDGISLFRTFLKQEGCADLLDFWFACTGFRKLEPCDSNEEKRLKLARAIYRKYILDNNGIVSRQTKPATKSFIKGCIMKQLIDPAMFDQAQTEIQATMEENTYPSFLKSDIYLEYTRTGSESPKVCSDQSSGSGTGKGISGYLPTLNEDEEWKCDQDMDEDDGRDAAPPGRLPQKLLLETAAPRVSSSRRYSEGREFRYGSWREPVNPYYVNAGYALAPATSANDSEQQSLSSDADTLSLTDSSVDGIPPYRIRKQHRREMQESVQVNGRVPLPHIPRTYRVPKEVRVEPQKFAEELIHRLEAVQRTREAEEKLEERLKRVRMEEEGEDGDPSSGPPGPCHKLPPAPAWHHFPPRCVDMGCAGLRDAHEENPESILDEHVQRVLRTPGRQSPGPGHRSPDSGHVAKMPVALGGAASGHGKHVPKSGAKLDAAGLHHHRHVHHHVHHSTARPKEQVEAEATRRAQSSFAWGLEPHSHGARSRGYSESVGAAPNASDGLAHSGKVGVACKRNAKKAESGKSASTEVPGASEDAEKNQKIMQWIIEGEKEISRHRRTGHGSSGTRKPQPHENSRPLSLEHPWAGPQLRTSVQPSHLFIQDPTMPPHPAPNPLTQLEEARRRLEEEEKRASRAPSKQRYVQEVMRRGRACVRPACAPVLHVVPAVSDMELSETETRSQRKVGGGSAQPCDSIVVAYYFCGEPIPYRTLVRGRAVTLGQFKELLTKKGSYRYYFKKVSDEFDCGVVFEEVREDEAVLPVFEEKIIGKVEKVD

SEQ ID NO: 154 - protein, 843 aa, Homo sapiens
MSSAMLVTCLPDPSSSFREDAPRPPVPGEEGETPPCQPGVGKGQVTKPMPVSSNTRRNEDGLGEPEGRASPDSPLTRWTKSLHSLLGDQDGAYLFRTFLEREKCVDTLDFWFACNGFRQMNLKDTKTLRVAKAIYKRYIENNSIVSKQLKPATKTYIRDGIKKQQIDSIMFDQAQTEIQSVMEENAYQMFLTSDIYLEYVRSGGENTAYMSNGGLGSLKVVCGYLPTLNEEEEWTCADFKCKLSPTVVGLSSKTLRATASVRSTETVDSGYRSFKRSDPVNPYHIGSGYVFAPATSANDSEISSDALTDDSMSMTDSSVDGIPPYRVGSKKQLQREMHRSVKANGQVSLPHFPRTHRLPKEMTPVEPATFAAELISRLEKLKLELESRHSLEERLQQIREDEEREGSELTLNSREGAPTQHPLSLLPSGSYEEDPQTILDDHLSRVLKTPGCQSPGVGRYSPRSRSPDHHHHHHSQYHSLLPPGGKLPPAAASPGACPLLGGKGFVTKQTTKHVHHHYIHHHAVPKTKEEIEAEATQRVHCFCPGGSEYYCYSKCKSHSKAPETMPSEQFGGSRGSTLPKRNGKGTEPGLALPAREGGAPGGAGALQLPREEGDRSQDVWQWMLESERQSKPKPHSAQSTKKAYPLESARSSPGERASRHHLWGGNSGHPRTTPRAHLFTQDPAMPPLTPPNTLAQLEEACRRLAEVSKPPKQRCCVASQQRDRNHSATVQTGATPFSNPSLAPEDHKEPKKLAGVHALQASELVVTYFFCGEEIPYRRMLKAQSLTLGHFKEQLSKKGNYRYYFKKASDEFACGAVFEEIWEDETVLPMYEGRILGKVERID

SEQ ID NO: 155 - protein, 1426 aa, Homo sapiens
MHSSNPKVRSSPSGNTQSSPKSKQEVMVRPPTVMSPSGNPQLDSKFSNQGKQGGSASQSQPSPCDSKSGGHTPKALPGPGGSMGLKNGAGNGAKGKGKRERSISADSFDQRDPGTPNDDSDIKECNSADHIKSQDSQHTPHSMTPSNATAPRSSTPSHGQTTATEPTPAQKTPAKVVYVFSTEMANKAAEAVLKGQVETIVSFHIQNISNNKTERSTAPLNTQISALRNDPKPLPQQPPAPANQDQNSSQNTRLQPTPPIPAPAPKPAAPPRPLDRESPGVENKLIPSVGSPASSTPLPPDGTGPNSTPNNRAVTPVSQGSNSSSADPKAPPPPPVSSGEPPTLGENPDGLSQEQLEHRERSLQTLRDIQRMLFPDEKEFTGAQSGGPQQNPGVLDGPQKKPEGPIQAMMAQSQSLGKGPGPRTDVGAPFGPQGHRDVPFSPDEMVPPSMNSQSGTIGPDHLDHMTPEQIAWLKLQQEFYEEKRRKQEQVVVQQCSLQDMMVHQHGPRGVVRGPPPPYQMTPSEGWAPGGTEPFSDGINMPHSLPPRGMAPHPNMPGSQMRLPGFAGMINSEMEGPNVPNPASRPGLSGVSWPDDVPKIPDGRNFPPGQGIFSGPGRGERFPNPQGLSEEMFQQQLAEKQLGLPPGMAMEGIRPSMEMNRMIPGSQRHMEPGNNPIFPRIPVEGPLSPSRGDFPKGIPPQMGPGRELEFGMVPSGMKGDVNLNVNMGSNSQMIPQKMREAGAGPEEMLKLRPGGSDMLPAQQKMVPLPFGEHPQQEYGMGPRPFLPMSQGPGSNSGLRNLREPIGPDQRTNSRLSHMPPLPLNPSSNPTSLNTAPPVQRGLGRKPLDISVAGSQVHSPGINPLKSPTMHQVQSPMLGSPSGNLKSPQTPSQLAGMLAGPAAAASIKSPPVLGSAAASPVHLKSPSLPAPSPGWTSSPKPPLQSPGIPPNHKAPLTMASPAMLGNVESGGPPPPTASQPASVNIPGSLPSSTPYTMPPEPTLSQNPLSIMMSRMSKFAMPSSTPLYHDAIKTVASSDDDSPPARSPNLPSMNNMPGMGINTQNPRISGPNPVVPMPTLSPMGMTQPLSHSNQMPSPNAVGPNIPPHGVPMGPGLMSHNPIMGHGSQEPPMVPQGRMGFPQGFPPVQSPPQQVPFPHNGPSGGQGSFPGGMGFPGEGPLGRPSNLPQSSADAALCKPGGPGGPDSFTVLGNSMPSVFTDPDLQEVIRPGATGIPEFDLSRIIPSEKPSQTLQYFPRGEVPGRKQPQGPGPGFSHMQGMMGEQAPRMGLALPGMGGPGPVGTPDIPLGTAPSMPGHNPMRPPAFLQQGMMGPHHRMMSPAQSTMPGQPTLMSNPAAAVGMIPGKDRGPAGLYTHPGPVGSPGMMMSMQGMMGPQQNIMIPPQMRPRGMAADVGMGGFSQGPGNPGNMMF

SEQ ID NO: 156 - protein, 605 aa, Homo sapiens
MDPAEAVLQEKALKFMCSMPRSLWLGCSSLADSMPSLRCLYNPGTGALTAFQNSSEREDCNNGEPPRKIIPEKNSLRQTYNSCARLCLNQETVCLASTAMKTENCVAKTKLANGTSSMIVPKQRKLSASYEKEKELCVKYFEQWSESDQVEFVEHLISQMCHYQHGHINSYLKPMLQRDFITALPARGLDHIAENILSYLDAKSLCAAELVCKEWYRVTSDGMLWKKLIERMVRTDSLWRGLAERRGWGQYLFKNKPPDGNAPPNSFYRALYPKIIQDIETIESNWRCGRHSLQRIHCRSETSKGVYCLQYDDQKIVSGLRDNTIKIWDKNTLECKRILTGHTGSVLCLQYDERVIITGSSDSTVRVWDVNTGEMLNTLIHHCEAVLHLRFNNGMMVTCSKDRSIAVWDMASPTDITLRRVLVGHRAAVNVVDFDDKYIVSASGDRTIKVWNTSTCEFVRTLNGHKRGIACLQYRDRLVVSGSSDNTIRLWDIECGACLRVLEGHEELVRCIRFDNKRIVSGAYDGKIKVWDLVAALDPRAPAGTLCLRTLVEHSGRVFRLQFDEFQIVSSSHDDTILIWDFLNDPAAQAEPPRSPSRTYTYISR

SEQ ID NO: 157 - protein, 906 aa, Homo sapiens
MAGNVKKSSGAGGGSGSGGSGSGGLIGLMKDAFQPHHHHHHHLSPHPPGTVDKKMVEKCWKLMDKVVRLCQNPKLALKNSPPYILDLLPDTYQHLRTILSRYEGKMETLGENEYFRVFMENLMKKTKQTISLFKEGKERMYEENSQPRRNLTKLSLIFSHMLAELKGIFPSGLFQGDTFRITKADAAEFWRKAFGEKTIVPWKSFRQALHEVHPISSGLEAMALKSTIDLTCNDYISVFEFDIFTRLFQPWSSLLRNWNSLAVTHPGYMAFLTYDEVKARLQKFIHKPGSYIFRLSCTRLGQWAIGYVTADGNILQTIPHNKPLFQALIDGFREGFYLFPDGRNQNPDLTGLCEPTPQDHIKVTQEQYELYCEMGSTFQLCKICAENDKDVKIEPCGHLMCTSCLTSWQESEGQGCPFCRCEIKGTEPIVVDPFDPRGSGSLLRQGAEGAPSPNYDDDDDERADDTLFMMKELAGAKVERPPSPFSMAPQASLPPVPPRLDLLPQRVCVPSSASALGTASKAASGSLHKDKPLPVPPTLRDLPPPPPPDRPYSVGAESRPQRRPLPCTPGDCPSRDKLPPVPSSRLGDSWLPRPIPKVPVSAPSSSDPWTGRELTNRHSLPFSLPSQMEPRPDVPRLGSTFSLDTSMSMNSSPLVGPECDHPKIKPSSSANAIYSLAARPLPVPKLPPGEQCEGEEDTEYMTPSSRPLRPLDTSQSSRACDCDQQIDSCTYEAMYNIQSQAPSITESSTFGEGNLAAAHANTGPEESENEDDGYDVPKPPVPAVLARRTLSDISNASSSFGWLSLDGDPTTNVTEGSQVPERPPKPFPRRINSERKAGSCQQGSGPAASAATASPQLSSEIENLMSQGYSYQDIQKALVIAQNNIEMAKNILREFVSISSPAHVAT

SEQ ID NO: 158 - protein, 365 aa, Homo sapiens
MASSSGSKAEFIVGGKYKLVRKIGSGSFGDIYLAINITNGEEVAVKLESQKARHPQLLYESKLYKILQGGVGIPHIRWYGQEKDYNVLVMDLLGPSLEDLFNFCSRRFTMKTVLMLADQMISRIEYVHTKNFIHRDIKPDNFLMGIGRHCNKCLESPVGKRKRSMTVSTSQDPSFSGLNQLFLIDFGLAKKYRDNRTRQHIPYREDKNLTGTARYASINAHLGIEQSRRDDMESLGYVLMYFNRTSLPWQGLKAATKKQKYEKISEKKMSTPVEVLCKGFPAEFAMYLNYCRGLRFEEAPDYMYLRQLFRILFRTLNHQYDYTFDWTMLKQKAAQQAASSSGQGQQAQTPTGKQTDKTKSNMKGF

SEQ ID NO: 159 - protein, 391 aa, Homo sapiens
MSGPVPSRARVYTDVNTHRPREYWDYESHVVEWGNQDDYQLVRKLGRGKYSEVFEAINITNNEKVVVKILKPVKKKKIKREIKILENLRGGPNIITLADIVKDPVSRTPALVFEHVNNTDFKQLYQTLTDYDIRFYMYEILKALDYCHSMGIMHRDVKPHNVMIDHEHRKLRLIDWGLAEFYHPGQEYNVRVASRYFKGPELLVDYQMYDYSLDMWSLGCMLASMIFRKEPFFHGHDNYDQLVRIAKVLGTEDLYDYIDKYNIELDPRFNDILGRHSRKRWERFVHSENQHLVSPEALDFLDKLLRYDHQSRLTAREAMEHPYFYTVVKDQARMGSSSMPGGSTPVSSANMMSGISSVPTPSPLGPLAGSPVIAAANPLGMPVPAAAGAQQ

SEQ ID NO: 160 - protein, 480 aa, Homo sapiens
MSAEVIHQVEEALDTDEKEMLLFLCRDVAIDVVPPNVRDLLDILRERGKLSVGDLAELLYRVRRFDLLKRILKMDRKAVETHLLRNPHLVSDYRVLMAEIGEDLDKSDVSSLIFLMKDYMGRGKISKEKSFLDLVVELEKLNLVAPDQLDLLEKCLKNIHRIDLKTKIQKYKQSVQGAGTSYRNVLQAAIQKSLKDPSNNFRLHNGRSKEQRLKEQLGAQQEPVKKSIQESEAFLPQSIPEERYKMKSKPLGICLIIDCIGNETELLRDTFTSLGYEVQKFLHLSMHGISQILGQFACMPEHRDYDSFVCVLVSRGGSQSVYGVDQTHSGLPLHHIRRMFMGDSCPYLAGKPKMFFIQNYVVSEGQLEDSSLLEVDGPAMKNVEFKAQKRGLCTVHREADFFWSLCTADMSLLEQSHSSPSLYLQCLSQKLRQERKRPLLDLHIELNGYMYDWNSRVSAKEKYYVWLQHTLRKKLILSYT

SEQ ID NO: 161 - protein, 781 aa, Homo sapiens
MATQADLMELDMAMEPDRKAAVSHWQQQSYLDSGIHSGATTTAPSLSGKGNPEEEDVDTSQVLYEWEQGFSQSFTQEQVADIDGQYAMTRAQRVRAAMFPETLDEGMQIPSTQFDAAHPTNVQRLAEPSQMLKHAVVNLINYQDDAELATRAIPELTKLLNDEDQVVVNKAAVMVHQLSKKEASRHAIMRSPQMVSAIVRTMQNTNDVETARCTAGTLHNLSHHREGLLAIFKSGGIPALVKMLGSPVDSVLFYAITTLHNLLLHQEGAKMAVRLAGGLQKMVALLNKTNVKFLAITTDCLQILAYGNQESKLIILASGGPQALVNIMRTYTYEKLLWTTSRVLKVLSVCSSNKPAIVEAGGMQALGLHLTDPSQRLVQNCLWTLRNLSDAATKQEGMEGLLGTLVQLLGSDDINVVTCAAGILSNLTCNNYKNKMMVCQVGGIEALVRTVLRAGDREDITEPAICALRHLTSRHQEAEMAQNAVRLHYGLPVVVKLLHPPSHWPLIKATVGLIRNLALCPANHAPLREQGAIPRLVQLLVRAHQDTQRRTSMGGTQQQFVEGVRMEEIVEGCTGALHILARDVHNRIVIRGLNTIPLFVQLLYSPIENIQRVAAGVLCELAQDKEAAEAIEAEGATAPLTELLHSRNEGVATYAAAVLFRMSEDKPQDYKKRLSVELTSSLFRTEPMAWNETADLGLDIGAQGEPLGYRQDDPSYRSFHSGGYGQDALGMDPMMEHEMGGHHPGADYPVDGLPDLGHAQDLMDGLPPGDSNQLAWFDTDL

SEQ ID NO: 162 - protein, 81 aa, Homo sapiens
MNREGAPGKSPEEMYIQQKVRVLLMLRKMGSNLTASEEEFLRTYAGVVNSQLSQLPPHSIDQGAEDVVMAFSRSETEDRRQ

SEQ ID NO: 163 - protein, 742 aa, Homo sapiens
MDKFWWHAAWGLCLVPLSLAQIDLNITCRFAGVFHVEKNGRYSISRTEAADLCKAFNSTLPTMAQMEKALSIGFETCRYGFIEGHVVIPRIHPNSICAANNTGVYILTSNTSQYDTYCFNASAPPEEDCTSVTDLPNAFDGPITITIVNRDGTRYVQKGEYRTNPEDIYPSNPTDDDVSSGSSSERSSTSGGYIFYTFSTVHPIPDEDSPWITDSTDRIPATTLMSTSATATETATKRQETWDWFSWLFLPSESKNHLHTTTQMAGTSSNTISAGWEPNEENEDERDRHLSFSGSGIDDDEDFISSTISTTPRAFDHTKQNQDWTQWNPSHSNPEVLLQTTTRMTDVDRNGTTAYEGNWNPEAHPPLIHHEHHEEEETPHSTSTIQATPSSTTEETATQKEQWFGNRWHEGYRQTPKEDSHSTTGTAAASAHTSHPMQGRTTPSPEDSSWTDFFNPISHPMGRGHQAGRRMDMDSSHSITLQPTANPNTGLVEDLDRTGPLSMTTQQSNSQSFSTSHEGLEEDKDHPTTSTLTSSNRNDVTGGRRDPNHSEGSTTLLEGYTSHYPHTKESRTFIPVTSAKTGSFGVTAVTVGDSNSNVNRSLSGDQDTFHPSGGSHTTHGSESDGHSHGSQEGGANTTSGPIRTPQIPEWLIILASLLALALILAVCIAVNSRRRCGQKKKLVINSGNGAVEDRKPSGLNGEASKSQEMVHLVNKESSETPDQFMTADETRNLQNVDMKIGV

SEQ ID NO: 164 - protein, 354 aa, Homo sapiens
MYREWVVVNVFMMLYVQLVQGSSNEHGPVKRSSQSTLERSEQQIRAASSLEELLRITHSEDWKLWRCRLRLKSFTSMDSRSASHRSTRFAATFYDIETLKVIDEEWQRTQCSPRETCVEVASELGKSTNTFFKPPCVNVFRCGGCCNEESLICMNTSTSYISKQLFEISVPLTSVPELVPVKVANHTGCKCLPTAPRHPYSIIRRSIQIPEEDRCSHSKKLCPIDMLWDSNKCKCVLQEENPLAGTEDHSHLQEPALCGPHMMFDEDRCECVCKTPCPKDLIQHPKNCSCFECKESLETCCQKHKLFHPDTCSCEDRCPFHTRPCASGKTACAKHCRFPKEKRAAQGPHSRKNP

SEQ ID NO: 165 - protein, 745 aa, Homo sapiens
MERPPGLRPGAGGPWEMRERLGTGGFGNVCLYQHRELDLKIAIKSCRLELSTKNRERWCHEIQIMKKLNHANVVKACDVPEELNILIHDVPLLAMEYCSGGDLRKLLNKPENCCGLKESQILSLLSDIGSGIRYLHENKIIHRDLKPENIVLQDVGGKIIHKIIDLGYAKDVDQGSLCTSFVGTLQYLAPELFENKPYTATVDYWSFGTMVFECIAGYRPFLHHLQPFTWHEKIKKKDPKCIFACEEMSGEVRFSSHLPQPNSLCSLVVEPMENWLQLMLNWDPQQRGGPVDLTLKQPRCFVLMDHILNLKIVHILNMTSAKIISFLLPPDESLHSLQSRIERETGINTGSQELLSETGISLDPRKPASQCVLDGVRGCDSYMVYLFDKSKTVYEGPFASRSLSDCVNYIVQDSKIQLPIIQLRKVWAEAVHYVSGLKEDYSRLFQGQRAAMLSLLRYNANLTKMKNTLISASQQLKAKLEFFHKSIQLDLERYSEQMTYGISSEKMLKAWKEMEEKAIHYAEVGVIGYLEDQIMSLHAEIMELQKSPYGRRQGDLMESLEQRAIDLYKQLKHRPSDHSYSDSTEMVKIIVHTVQSQDRVLKELFGHLSKLLGCKQKIIDLLPKVEVALSNIKEADNTVMFMQGKRQKEIWHLLKIACTQSSARSLVGSSLEGAVTPQTSAWLPPTSAEHDHSLSCVVTPQDGETSAQMIEENLNCLGHLSTIIHEANEEQGNSMMNLDWSWLTE

SEQ ID NO: 166 - protein, 440 aa, Homo sapiens
MGSSHLLNKGLPLGVRPPIMNGPLHPRPLVALLDGRDCTVEMPILKDVATVAFCDAQSTQEIHEKVLNEAVGALMYHTITLTREDLEKFKALRIIVRIGSGFDNIDIKSAGDLGIAVCNVPAASVEETADSTLCHILNLYRRATWLHQALREGTRVQSVEQIREVASGAARIRGETLGIIGLGRVGQAVALRAKAFGFNVLFYDPYLSDGVERALGLQRVSTLQDLLFHSDCVTLHCGLNEHNHHLINDFTVKQMRQGAFLVNTARGGLVDEKALAQALKEGRIRGAALDVHESEPFSFSQGPLKDAPNLICTPHAAWYSEQASIEMREEAAREIRRAITGRIPDSLKNCVNKDHLTAATHWASMDPAVVHPELNGAAYRYPPGVVGVAPTGIPAAVEGIVPSAMSLSHGLPPVAHPPHAPSPGQTVKPEADRDHASDQL

SEQ ID NO: 167 - protein, 367 aa, Homo sapiens
MNTNVCVEPGPSPEAPGLPKESHLPEGALNSLVDYNSEMERYRSFATSFYKTNGGAFPQAAKIARITTPIFPSSAAAAAAAARIGMSPWNCDNAATAAAATAMLWGSGGGGGGGGGGGGGGGGGGGGGGGGGGGRKSSSAAASSSASSSSAILPAGGGGGGGGGGSRTSMHHRNDSQRLGKAGCPPEPSLQMANTNFLSTLSPEHCRPLAGECMNKLKCGAAEAEIMNLPERVGTFSAIPALGGISLPPGVIVMTALHSPAAASAAVTDSAFQIANLADCPQNHSSSSSSSSGGAGGANPAKKKRKRCGVCVPCKRLINCGVCSSCRNRKTGHQICKFRKCEELKKKPGTSLERTPVPSAEAFRWFF

SEQ ID NO: 168 - protein, 295 aa, Homo sapiens
MEHQLLCCEVETIRRAYPDANLLNDRVLRAMLKAEETCAPSVSYFKCVQKEVLPSMRKIVATWMLEVCEEQKCEEEVFPLAMNYLDRFLSLEPVKKSRLQLLGATCMFVASKMKETIPLTAEKLCIYTDNSIRPEELLQMELLLVNKLKWNLAAMTPHDFIEHFLSKMPEAEENKQIIRKHAQTFVALCATDVKFISNPPSMVAAGSVVAAVQGLNLRSPNNFLSYYRLTRFLSRVIKCDPDCLRACQEQIEALLESSLRQAQQNMDPKAAEEEEEEEEEVDLACTPTDVRDVDI

SEQ ID NO: 169 - protein, 289 aa, Homo sapiens
MELLCHEVDPVRRAVRDRNLLRDDRVLQNLLTIEERYLPQCSYFKCVQKDIQPYMRRMVATWMLEVCEEQKCEEEVFPLAMNYLDRFLAGVPTPKSHLQLLGAVCMFLASKLKETSPLTAEKLCIYTDNSIKPQELLEWELVVLGKLKWNLAAVTPHDFIEHILRKLPQQREKLSLIRKHAQTFIALCATDFKFAMYPPSMIATGSVGAAICGLQQDEEVSSLTCDALTELLAKITNTDVDCLKACQEQIEAVLLNSLQQYRQDQRDGSKSEDELDQASTPTDVRDIDL

SEQ ID NO: 170 - protein, 410 aa, Homo sapiens
MPRERRERDAKERDTMKEDGGAEFSARSRKRKANVTVFLQDPDEEMAKIDRTARDQCGSQPWDNNAVCADPCSLIPTPDKEDDDRVYPNSTCKPRIIAPSRGSPLPVLSWANREEVWKIMLNKEKTYLRDQHFLEQHPLLQPKMRAILLDWLMEVCEVYKLHRETFYLAQDFFDRYMATQENVVKTLLQLIGISSLFIAAKLEEIYPPKLHQFAYVTDGACSGDEILTMELMIMKALKWRLSPLTIVSWLNVYMQVAYLNDLHEVLLPQYPQQIFIQIAELLDLCVLDVDCLEFPYGILAASALYHFSSSELMQKVSGYQWCDIENCVKWMVPFAMVIRETGSSKLKHFRGVADEDAHNIQTHRDSLDLLDKARAKKAMLSEQNRASPLPSGLLTPPQSGKKQSSGPEMA

SEQ ID NO: 171 - protein, 164 aa, Homo sapiens
MSEPAGDVRQNPCGSKACRRLFGPVDSEQLSRDCDALMAGCIQEARERWNFDFVTETPLEGDFAWERVRGLGLPKLYLPTGPRRGRDELGGGRRPGTSPALLQGTAEEDHVDLSLSCTLVPRSGEQAEGSPGGPGDSQGRKRRQTSMTDFYHSKRRLIFSKRKP

SEQ ID NO: 172 - protein, 723 aa, Homo sapiens
MGSRCALALAVLSALLCQVWSSGVFELKLQEFVNKKGLLGNRNCCRGGAGPPPCACRTFFRVCLKHYQASVSPEPPCTYGSAVTPVLGVDSFSLPDGGGADSAFSNPIRFPFGFTWPGTFSLIIEALHTDSPDDLATENPERLISRLATQRHLTVGEEWSQDLHSSGRTDLKYSYRFVCDEHYYGEGCSVFCRPRDDAFGHFTCGERGEKVCNPGWKGPYCTEPICLPGCDEQHGFCDKPGECKCRVGWQGRYCDECIRYPGCLHGTCQQPWQCNCQEGWGGLFCNQDLNYCTHHKPCKNGATCTNTGQGSYTCSCRPGYTGATCELGIDECDPSPCKNGGSCTDLENSYSCTCPPGFYGKICELSAMTCADGPCFNGGRCSDSPDGGYSCRCPVGYSGFNCEKKIDYCSSSPCSNGAKCVDLGDAYLCRCQAGFSGRHCDDNVDDCASSPCANGGTCRDGVNDFSCTCPPGYTGRNCSAPVSRCEHAPCHNGATCHERGHRYVCECARGYGGPNCQFLLPELPPGPAVVDLTEKLEGQGGPFPWVAVCAGVILVLMLLLGCAAVVVCVRLRLQKHRPPADPCRGETETMNNLANCQREKDISVSIIGATQIKNTNKKADFHGDHSADKNGFKARYPAVDYNLVQDLKGDDTAVRDAHSKRDTKCQPQGSSGEEKGTPTTLRGGEASERKRPDSGCSTSKDTKYQSVYVISEEKDECVIATEV

SEQ ID NO: 173 - protein, 618 aa, Homo sapiens
MVSPRMSGLLSQTVILALIFLPQTRPAGVFELQIHSFGPGPGPGAPRSPCSARLPCRLFFRVCLKPGLSEEAAESPCALGAALSARGPVYTEQPGAPAPDLPLPDGLLQVPFRDAWPGTFSFIIETWREELGDQIGGPAWSLLARVAGRRRLAAGGPWARDIQRAGAWELRFSYRARCEPPAVGTACTRLCRPRSAPSRCGPGLRPCAPLEDECEAPLVCRAGCSPEHGFCEQPGECRCLEGWTGPLCTVPVSTSSCLSPRGPSSATTGCLVPGPGPCDGNPCANGGSCSETPRSFECTCPRGFYGLRCEVSGVTCADGPCFNGGLCVGGADPDSAYICHCPPGFQGSNCEKRVDRCSLQPCRNGGLCLDLGHALRCRCRAGFAGPRCEHDLDDCAGRACANGGTCVEGGGAHRCSCALGFGGRDCRERADPCAARPCAHGGRCYAHFSGLVCACAPGYMGARCEFPVHPDGASALPAAPPGLRPGDPQRYLLPPALGLLVAAGVAGAALLLVHVRRRGHSQDAGSRLLAGTPEPSVHALPDALNNLRTQEGSGDGPSSSVDWNRPEDVDPQGIYVISAPSIYAREVATPLFPPLHTGRAGQRQHLLFPYPSSILSVK

SEQ ID NO: 174 - protein, 685 aa, Homo sapiens
MAAASRSASGWALLLLVALWQQRAAGSGVFQLQLQEFINERGVLASGRPCEPGCRTFFRVCLKHFQAVVSPGPCTFGTVSTPVLGTNSFAVRDDSSGGGRNPLQLPFNFTWPGTFSLIIEAWHAPGDDLRPEALPPDALISKIAIQGSLAVGQNWLLDEQTSTLTRLRYSYRVICSDNYYGDNCSRLCKKRNDHFGHYVCQPDGNLSCLPGWTGEYCQQPICLSGCHEQNGYCSKPAECLCRPGWQGRLCNECIPHNGCRHGTCSTPWQCTCDEGWGGLFCDQDLNYCTHHSPCKNGATCSNSGQRSYTCTCRPGYTGVDCELELSECDSNPCRNGGSCKDQEDGYHCLCPPGYYGLHCEHSTLSCADSPCFNGGSCRERNQGANYACECPPNFTGSNCEKKVDRCTSNPCANGGQCLNRGPSRMCRCRPGFTGTYCELHVSDCARNPCAHGGTCHDLENGLMCTCPAGFSGRRCEVRTSIDACASSPCFNRATCYTDLSTDTFVCNCPYGFVGSRCEFPVGLPPSFPWVAVSLGVGLAVLLVLLGMVAVAVRQLRLRRPDDGSREAMNNLSDFQKDNLIPAAQLKNTNQKKELEVDCGLDKSNCGKQQNHTLDYNLAPGPLGRGTMPGKFPHSDKSLGEKAPLRLHSEKPECRISAICSPRDSMYQSVCLISEERNECVIATEV

SEQ ID NO: 175 - protein, 620 aa, Homo sapiens
MSRPGHGGLMPVNGLGFPPQNVARVVVWEWLNEHSRWRPYTATVCHHIENVLKEDARGSVVLGQVDAQLVPYIIDLQSMHQFRQDTGTMRPVRRNFYDPSSAPGKGIVWEWENDGGAWTAYDMDICITIQNAYEKQHPWLDLSSLGFCYLIYFNSMSQMNRQTRRRRRLRRRLDLAYPLTVGSIPKSQSWPVGASSGQPCSCQQCLLVNSTRAASNAILASQRRKAPPAPPLPPPPPPGGPPGALAVRPSATFTGAALWAAPAAGPAEPAPPPGAPPRSPGAPGGARTPGQNNLNRPGPQRTTSVSARASIPPGVPALPVKNLNGTGPVHPALAGMTGILLCAAGLPVCLTRAPKPILHPPPVSKSDVKPVPGVPGVCRKTKKKHLKKSKNPEDVVRRYMQKVKNPPDEDCTICMERLVTASGYEGVLRHKGVRPELVGRLGRCGHMYHLLCLVAMYSNGNKDGSLQCPTCKAIYGEKTGTQPPGKMEFHLIPHSLPGFPDTQTIRIVYDIPTGIQGPEHPNPGKKFTARGFPRHCYLPNNEKGRKVLRLLITAWERRLIFTIGTSNTTGESDTVVWNEIHHKTEFGSNLTGHGYPDASYLDNVLAELTAQGVSEAAAKA

SEQ ID NO: 176 - protein, 266 aa, Homo sapiens
MMALGAAGATRVFVAMVAAALGGHPLLGVSATLNSVLNSNAIKNLPPPLGGAAGHPGSAVSAAPGILYPGGNKYQTIDNYQPYPCAEDEECGTDEYCASPTRGGDAGVQICLACRKRRKRCMRHAMCCPGNYCKNGICVSSDQNHFRGEIEETITESFGNDHSTLDGYSRRTTLSSKMYHTKGQEGSVCLRSSDCASGLCCARHFWSKICKPVLKEGQVCTKHRRKGSHGLEIFQRCYCGEGLSCRIQKDHHQASNSSRLHTCQRH

SEQ ID NO: 177 - protein, 350 aa, Homo sapiens
MQRLGATLLCLLLAAAVPTAPAPAPTATSAPVKPGPALSYPQEEATLNEMFREVEELMEDTQHKLRSAVEEMEAEEAAAKASSEVNLANLPPSYHNETNTDTKVGNNTIHVHREIHKITNNQTGQMVFSETVITSVGDEEGRRSHECIIDEDCGPSMYCQFASFQYTCQPCRGQRMLCTRDSECCGDQLCVWGHCTKMATRGSNGTICDNQRDCQPGLCCAFQRGLLFPVCTPLPVEGELCHDPASRLLDLITWELEPDGALDRCPCASGLLCQPHSHSLVYVCKPTFVGSRDQDGEILLPREVPDEYEVGSFMEEVRQELEDLERSLTEEMALREPAAAAAALLGGEEI

SEQ ID NO: 178 - protein, 770 aa, Homo sapiens
MSNEVETSATNGQPDQQAAPKAPSKKEKKKGPEKTDEYLLARFKGDGVKYKAKLIGIDDVPDARGDKMSQDSMMKLKGMAAAGRSQGQHKQRIWVNISLSGIKIIDEKTGVIEHEHPVNKISFIARDVTDNRAFGYVCGGEGQHQFFAIKTGQQAEPLVVDLKDLFQVIYNVKKKEEEKKKIEEASKAVENGSEALMILDDQTNKLKSGVDQMDLFGDMSTPPDLNSPTESKDILLVDLNSEIDTNQNSLRENPFLTNGITSCSLPRPTPQASFLPENAFSANLNFFPTPNPDPFRDDPFTQPDQSTPSSFDSLKSPDQKKENSSSSSTPLSNGPLNGDVDYFGQQFDQISNRTGKQEAQAGPWPFSSSQTQPAVRTQNGVSEREQNGFSVKSSPNPFVGSPPKGLSIQNGVKQDLESSVQSSPHDSIAIIPPPQSTKPGRGRRTAKSSANDLLASDIFAPPVSEPSGQASPTGQPTALQPNPLDLFKTSAPAPVGPLVGLGGVTVTLPQAGPWNTASLVFNQSPSMAPGAMMGGQPSGFSQPVIFGTSPAVSGWNQPSPFAASTPPPVPVVWGPSASVAPNAWSTTSPLGNPFQSNIFPAPAVSTQPPSMHSSLLVTPPQPPPRAGPPKDISSDAFTALDPLGDKEIKDVKEMFKDFQLRQPPAVPARKGEQTSSGTLSAFASYFNSKVGIPQENADHDDFDANQLLNKINEPPKPAPRQVSLPVTKSTDNAFENPFFKDSFGSSQASVASSQPVSSEMYRDPFGNPFA

SEQ ID NO: 179 - protein, 1078 aa, Homo sapiens
MAPRKRGGRGISFIFCCFRNNDHPEITYRLRNDSNFALQTMEPALPMPPVEELDVMFSELVDELDLTDKHREAMFALPAEKKWQIYCSKKKDQEENKGATSWPEFYIDQLNSMAARKSLLALEKEEEEERSKTIESLKTALRTKPMRFVTRFIDLDGLSCILNFLKTMDYETSESRIHTSLIGCIKALMNNSQGRAHVLAHSESINVIAQSLSTENIKTKVAVLEILGAVCLVPGGHKKVLQAMLHYQKYASERTRFQTLINDLDKSTGRYRDEVSLKTAIMSFINAVLSQGAGVESLDFRLHLRYEFLMLGIQPVIDKLREHENSTLDRHLDFFEMLRNEDELEFAKRFELVHIDTKSATQMFELTRKRLTHSEAYPHFMSILHHCLQMPYKRSGNTVQYWLLLDRIIQQIVIQNDKGQDPDSTPLENFNIKNVVRMLVNENEVKQWKEQAEKMRKEHNELQQKLEKKERECDAKTQEKEEMMQTLNKMKEKLEKETTEHKQVKQQVADLTAQLHELSRRAVCASIPGGPSPGAPGGPFPSSVPGSLLPPPPPPPLPGGMLPPPPPPLPPGGPPPPPGPPPLGAIMPPPGAPMGLALKKKSIPQPTNALKSFNWSKLPENKLEGTVWTEIDDTKVFKILDLEDLERTFSAYQRQQDFFVNSNSKQKEADAIDDTLSSKLKVKELSVIDGRRAQNCNILLSRLKLSNDEIKRAILTMDEQEDLPKDMLEQLLKFVPEKSDIDLLEEHKHELDRMAKADRFLFEMSRINHYQQRLQSLYFKKKFAERVAEVKPKVEAIRSGSEEVFRSGALKQLLEVVLAFGNYMNKGQRGNAYGFKISSLNKIADTKSSIDKNITLLHYLITIVENKYPSVLNLNEELRDIPQAAKVNMTELDKEISTLRSGLKAVETELEYQKSQPPQPGDKFVSVVSQFITVASFSFSDVEDLLAEAKDLFTKAVKHFGEEAGKIQPDEFFGIFDQFLQAVSEAKQENENMRKKKEEEERRARMEAQLKEQRERERKMRKAKENSEESGEFDDLVSALRSGEVFDKDLSKLKRNRKRITNQMTDSSRERPITKLNF

SEQ ID NO: 180 - protein, 670 aa, Homo sapiens
MAETKIIYHMDEEETPYLVKLPVAPERVTLADFKNVLSNRPVHAYKFFFKSMDQDFGVVKEEIFDDNAKLPCFNGRVVSWLVLAEGAHSDAGSQGTDSHTDLPPPLERTGGIGDSRPPSFHPNVASSRDGMDNETGTESMVSHRRERARRRNREEAARTNGHPRGDRRRDVGLPPDSASTALSSELESSSFVDSDEDGSTSRLSSSTEQSTSSRLIRKHKRRRRKQRLRQADRASSFSSITDSTMSLNIVTVTLNMERHHFLGISIVGQSNDRGDGGIYIGSIMKGGAVAADGRIEPGDMLLQVNDVNFENMSNDDAVRVLREIVSQTGPISLTVAKCWDPTPRSYFTVPRADPVRPIDPAAWLSHTAALTGALPRYELEEAPLTVKSDMSAVVRVMQLPDSGLEIRDRMWLKITIANAVIGADVVDWLYTHVEGFKERREARKYASSLLKHGFLRHTVNKITFSEQCYYVFGDLCSNLATLNLNSGSSGTSDQDTLAPLPHPAAPWPLGQGYPYQYPGPPPCFPPAYQDPGFSYGSGSTGSQQSEGSKSSGSTRSSRRAPGREKERRAAGAGGSGSESDHTAPSGVGSSWRERPAGQLSRGSSPRSQASATAPGLPPPHPTTKAYTVVGGPPGGPPVRELAAVPPELTGSRQSFQKAMGNPCEFFVDIM

SEQ ID NO: 181 - protein, 736 aa, Homo sapiens
MAGSSTGGGGVGETKVIYHLDEEETPYLVKIPVPAERITLGDFKSVLQRPAGAKYFFKSMDQDFGVVKEEISDDNARLPCFNGRVVSWLVSSDNPQPEMAPPVHEPRAELAPPAPPLPPLPPERTSGIGDSRPPSFHPNVSSSHENLEPETETESVVSLRRERPRRRDSSEHGAGGHRTGGPSRLERHLAGYESSSTLMTSELESTSLGDSDEEDTMSRFSSSTEQSSASRLLKRHRRRRKQRPPRLERTSSFSSVTDSTMSLNIITVTLNMEKYNFLGISIVGQSNERGDGGIYIGSIMKGGAVAADGRIEPGDMLLQVNDMNFENMSNDDAVRVLRDIVHKPGPIVLTVAKCWDPSPQAYFTLPRNEPIQPIDPAAWVSHSAALTGTFPAYPGSSSMSTITSGSSLPDGCEGRGLSVHTDMASVTKAMAAPESGLEVRDRMWLKITIPNAFLGSDVVDWLYHHVEGFPERREARKYASGLLKAGLIRHTVNKITFSEQCYYVFGDLSGGCESYLVNLSLNDNDGSSGASDQDTLAPLPGATPWPLLPTFSYQYPAPHPYSPQPPPYHELSSYTYGGGSASSQHSEGSRSSGSTRSDGGAGRTGRPEERAPESKSGSGSESEPSSRGGSLRRGGEASGTSDGGPPPSRGSTGGAPNLRAHPGLHPYGPPPGMALPYNPMMVVMMPPPPPPVPPAVQPPGAPPVRDLGSVPPELTASRQSFHMAMGNPSEFFVDVM

SEQ ID NO: 182 - protein, 683 aa, Homo sapiens
MLACLTRGNLLDVLQEGFNEQQLQAYVAWVNAQLKKRPAVKPVQDLRQDLRDGVILAYLIEIVAGEKLSGVQLSPGNQQEMKNNVEKVLQFVASKKIRMHQTSAKDIVDGNLKSIMRLVLALAAHFKPGSSRTVNQGRDSRAPLQSHRPHCATAVAQGAAAALADVCHDMSRSGRDVFRYRQRNSSMDEEIENPYWSVRALVQQYEGQQRSPSESSCSSLTSPSPIHSAKSESIITQSEEKADFVIIPAEGIENRTEGTDSPLSRDWRPGSPGTYLETSWEEQLLEQQEYLEKEMEEAKKMISGLQALLLNGSLPEDEQERPLALCEPGVNPEEQLIIIQSRLDQSMEENQDLKKELLKCKQEARNLQGIKDALQQRLTQQDTSVLQLKQELLRANMDKDELHNQNVDLQRKLDERNRLLGEYKKELGQKDRLLQQHQAKLEEALRKLSDVSYHQVDLERELEHKDVLLAHCMKREADEATNYNSHNSQSNGFLLPTAGKGATSVSNRGTSDLQLVRDALRSLRNSFSGHDPQHHTIDSLEQGISSLMERLHVMETQKKQERKVRVKSPRTQVGSEYRESWPPNSKLPHSQSSPTVSSTCTKVLYFTDRSLTPFMVNIPKRLEEVTLKDFKAAIDREGNHRYHFKALDPEFGTVKEEIFHDDDAIPGWEGKIVAWVEEDHGEN

SEQ ID NO: 183 - protein, 2414 aa, Homo sapiens
MAENVVEPGPPSAKRPKLSSPALSASASDGTDFGSLFDLEHDLPDELINSTELGLTNGGDINQLQTSLGMVQDAASKHKQLSELLRSGSSPNLNMGVGGPGQVMASQAQQSSPGLGLINSMVKSPMTQAGLTSPNMGMGTSGPNQGPTQSTGMMNSPVNQPAMGMNTGMNAGMNPGMLAAGNGQGIMPNQVMNGSIGAGRGRQNMQYPNPGMGSAGNLLTEPLQQGSPQMGGQTGLRGPQPLKMGMMNNPNPYGSPYTQNPGQQIGASGLGLQIQTKTVLSNNLSPFAMDKKAVPGGGMPNMGQQPAPQVQQPGLVTPVAQGMGSGAHTADPEKRKLIQQQLVLLLHAHKCQRREQANGEVRQCNLPHCRTMKNVLNHMTHCQSGKSCQVAHCASSRQIISHWKNCTRHDCPVCLPLKNAGDKRNQQPILTGAPVGLGNPSSLGVGQQSAPNLSTVSQIDPSSIERAYAALGLPYQVNQMPTQPQVQAKNQQNQQPGQSPQGMRPMSNMSASPMGVNGGVGVQTPSLLSDSMLHSAINSQNPMMSENASVPSLGPMPTAAQPSTTGIRKQWHEDITQDLRNHLVHKLVQAIFPTPDPAALKDRRMENLVAYARKVEGDMYESANNRAEYYHLLAEKIYKIQKELEEKRRTRLQKQNMLPNAAGMVPVSMNPGPNMGQPQPGMTSNGPLPDPSMIRGSVPNQMMPRITPQSGLNQFGQMSMAQPPIVPRQTPPLQHHGQLAQPGALNPPMGYGPRMQQPSNQGQFLPQTQFPSQGMNVTNIPLAPSSGQAPVSQAQMSSSSCPVNSPIMPPGSQGSHIHCPQLPQPALHQNSPSPVPSRTPTPHHTPPSIGAQQPPATTIPAPVPTPPAMPPGPQSQALHPPPRQTPTPPTTQLPQQVQPSLPAAPSADQPQQQPRSQQSTAASVPTPTAPLLPPQPATPLSQPAVSIEGQVSNPPSTSSTEVNSQAIAEKQPSQEVKMEAKMEVDQPEPADTQPEDISESKVEDCKMESTETEERSTELKTEIKEEEDQPSTSATQSSPAPGQSKKKIFKPEELRQALMPTLEALYRQDPESLPFRQPVDPQLLGIPDYFDIVKSPMDLSTIKRKLDTGQYQEPWQYVDDIWLMFNNAWLYNRKTSRVYKYCSKLSEVFEQEIDPVMQSLGYCCGRKLEFSPQTLCCYGKQLCTIPRDATYYSYQNRYHFCEKCFNEIQGESVSLGDDPSQPQTTINKEQFSKRKNDTLDPELFVECTECGRKMHQICVLHHEIIWPAGFVCDGCLKKSARTRKENKFSAKRLPSTRLGTFLENRVNDFLRRQNHPESGEVTVRVVHASDKTVEVKPGMKARFVDSGEMAESFPYRTKALFAFEEIDGVDLCFFGMHVQEYGSDCPPPNQRRVYISYLDSVHFFRPKCLRTAVYHEILIGYLEYVKKLGYTTGHIWACPPSEGDDYIFHCHPPDQKIPKPKRLQEWYKKMLDKAVSERIVHDYKDIFKQATEDRLTSAKELPYFEGDFWPNVLEESIKELEQEEEERKREENTSNESTDVTKGDSKNAKKKNNKKTSKNKSSLSRGNKKKPGMPNVSNDLSQKLYATMEKHKEVFFVIRLIAGPAANSLPPIVDPDPLIPCDLMDGRDAFLTLARDKHLEFSSLRRAQWSTMCMLVELHTQSQDRFVYTCNECKHHVETRWHCTVCEDYDLCITCYNTKNHDHKMEKLGLGLDDESNNQQAAATQSPGDSRRLSIQRCIQSLVHACQCRNANCSLPSCQKMKRVVQHTKGCKRKTNGGCPICKQLIALCCYHAKHCQENKCPVPFCLNIKQKLRQQQLQHRLQQAQMLRRRMASMQRTGVVGQQQGLPSPTPATPTTPTGQQPTTPQTPQPTSQPQPTPPNSMPPYLPRTQAAGPVSQGKAAGQVTPPTPPQTAQPPLPGPPPAAVEMAMQIQRAAETQRQMAHVQIFQRPIQHQMPPMTPMAPMGMNPPPMTRGPSGHLEPGMGPTGMQQQPPWSQGGLPQPQQLQSGMPRPAMMSVAQHGQPLNMAPQPGLGQVGISPLKPGTVSQQALQNLLRTLRSPSSPLQQQQVLSILHANPQLLAAFIKQRAAKYANSNPQPIPGQPGMPQGQPGLQPPTMPGQQGVHSNPAMQNMNPMQAGVQRAGLPQQQPQQQLQPPMGGMSPQAQQMNMNHNTMPSQFRDILRRQQMMQQQQQQGAGPGIGPGMANHNQFQQPQGVGYPPQQQQRMQHHMQQMQQGNMGQIGQLPQALGAEAGASLQAYQQRLLQQQMGSPVQPNPMSPQQHMLPNQAQSPHLQGQQIPNSLSNQVRSPQPVPSPRPQSQPPHSSPSPRMQPQPSPHHVSPQTSSPHPGLVAAQANPMEQGHFASPDQNSMLSQLASNPGMANLHGASATDLGLSTDNSDLNSNLSQSTLDIH

SEQ ID NO: 184 - protein, 380 aa, Homo sapiens
MMFSGFNADYEASSSRCSSASPAGDSLSYYHSPADSFSSMGSPVNAQDFCTDLAVSSANFIPTVTAISTSPDLQWLVQPALVSSVAPSQTRAPHPFGVPAPSAGAYSRAGVVKTMTGGRAQSIGRRGKVEQLSPEEEEKRRIRRERNKMAAAKCRNRRRELTDTLQAETDQLEDEKSALQTEIANLLKEKEKLEFILAAHRPACKIPDDLGFPEEMSVASLDLTGGLPEVATPESEEAFTLPLLNDPEPKPSVEPVKSISSMELKTEPFDDFLFPASSRPSGSETARSVPDMDLSGSFYAADWEPLHSGSLGMGPMATELEPLCTPVVTCTPSCTAYTSSFVFTYPEADSFPSCAAAHRKGSSSNEPSSDSLSSPTLLAL

SEQ ID NO: 185 - protein, 542 aa, Homo sapiens
MEPDSVIEDKTIELMCSVPRSLWLGCANLVESMCALSCLQSMPSVRCLQISNGTSSVIVSRKRPSEGNYQKEKDLCIKYFDQWSESDQVEFVEHLISRMCHYQHGHINSYLKPMLQRDFITALPEQGLDHIAENILSYLDARSLCAAELVCKEWQRVISEGMLWKKLIERMVRTDPLWKGLSERRGWDQYLFKNRPTDGPPNSFYRSLYPKIIQDIETIESNWRCGRHNLQRIQCRSENSKGVYCLQYDDEKIISGLRDNSIKIWDKTSLECLKVLTGHTGSVLCLQYDERVIVTGSSDSTVRVWDVNTGEVLNTLIHHNEAVLHLRFSNGLMVTCSKDRSIAVWDMASATDITLRRVLVGHRAAVNVVDFDDKYIVSASGDRTIKVWSTSTCEFVRTLNGHKRGIACLQYRDRLVVSGSSDNTIRLWDIECGACLRVLEGHEELVRCIRFDNKRIVSGAYDGKIKVWDLQAALDPRAPASTLCLRTLVEHSGRVFRLQFDEFQIISSSHDDTILIWDFLNVPPSAQNETRSPSRTYTYISR

SEQ ID NO: 186 - protein, 412 aa, Homo sapiens
MAAAAGEEEEEEEAARESAARPAAGPALWRLPEELLLLICSYLDMRALGRLAQVCRWLRRFTSCDLLWRRIARASLNSGFTRLGTDLMTSVPVKERVKVSQNWRLGRCREGILLKWRCSQMPWMQLEDDSLYISQANFILAYQFRPDGASLNRRPLGVFAGHDEDVCHFVLANSHIVSAGGDGKIGIHKIHSTFTVKYSAHEQEVNCVDCKGGIIVSGSRDRTAKVWPLASGRLGQCLHTIQTEDRVWSIAISPLLSSFVTGTACCGHFSPLRIWDLNSGQLMTHLGSDFPPGAGVLDVMYESPFTLLSCGYDTYVRYWDLRTSVRKCVMEWEEPHDSTLYCLQTDGNHLLATGSSYYGVVRLWDRRQRACLHAFPLTSTPLSSPVYCLRLTTKHLYAALSYNLHVLDFQNP

SEQ ID NO: 187 - protein, 206 aa, Homo sapiens
MSGPGTAAVALLPAVLLALLAPWAGRGGAAAPTAPNGTLEAELERRWESLVALSLARLPVAAQPKEAAVQSGAGDYLLGIKRLRRLYCNVGIGFHLQALPDGRIGGAHADTRDSLLELSPVERGVVSIFGVASRFFVAMSSKGKLYGSPFFTDECTFKEILLPNNYNAYESYKYPGMFIALSKNGKTKKGNRVSPTMKVTHFLPRL

SEQ ID NO: 188 - protein, 648 aa, Homo sapiens
MVSLPPPQSDVTLPGPTRLEGERQGDLMQAPGLPGSPAPQSKHAGFSCSSFVSDGPPERTPSLPPHSPRIASPGPEQVQGHCPAGPGPGPFRLSPSDKYPGFGFEEAAASSPGRFLKGSHAPFHPYKRPFHEDVFPEAETTLALKGHSFKTPGPLEAFEEIPVDVAEAEAFLPGFSAEAWCNGLPYPSQEHGPQVLGSEVKVKPPVLESGAGMFCYQPPLQHMYCSSQPPFHQYSPGGGSYPIPYLGSSHYQYQRMAPQASTDGHQPLFPKPIYSYSILIFMALKNSKTGSLPVSEIYNFMTEHFPYFKTAPDGWKNSVRHNLSLNKCFEKVENKSGSSSRKGCLWALNPAKIDKMQEELQKWKRKDPIAVRKSMAKPEELDSLIGDKREKLGSPLLGCPPPGLSGSGPIRPLAPPAGLSPPLHSLHPAPGPIPGKNPLQDLLMGHTPSCYGQTYLHLSPGLAPPGPPQPLFPQPDGHLELRAQPGTPQDSPLPAHTPPSHSAKLLAEPSPARTMHDTLLPDGDLGTDLDAINPSLTDFDFQGNLWEQLKDDSLALDPLVLVTSSPTSSSMPPPQPPPHCFPPGPCLTETGSGAGDLAAPGSGGSGALGDLHLTTLYSAFMELEPTPPTAPAGPSVYLSPSSKPVALA

SEQ ID NO: 189 - protein, 271 aa, Homo sapiens
MFRDFGEPGPSSGNGGGYGGPAQPPAAAQAAQQKFHLVPSINTMSGSQELQWMVQPHFLGPSSYPRPLTYPQYSPPQPRPGVIRALGPPPGVRRRPCEQISPEEEERRRVRRERNKLAAAKCRNRRKELTDFLQAETDKLEDEKSGLQREIEELQKQKERLELVLEAHRPICKIPEGAKEGDTGSTSGTSSPPAPCRPVPCISLSPGPVLEPEALHTPTLMTTPSLTPFTPSLVFTYPSTPEPCASAHRKSSSSSGDPSSDPLGSPTLLAL

SEQ ID NO: 190 - protein, 279 aa, Homo sapiens
MPCRREEEEEAGEEAEGEEEEEDSFLLLQQSVALGSSGEVDRLVAQIGETLQLDAAQHSPASPCGPPGAPLRAPGPLAAAVPADKARSPAVPLLLPPALAETVGPAPPGVLRCALGDRGRVRGRAAPYCVAELATGPSALSPLPPQADLDGPPGAGKQGIPQPLSGPCRRGWLRGAAASRRLQQRRGSQPETRTGDDDPHRLLQQLVLSGNLIKEAVRRLHSRRLQLRAKLPQRPLLGPLSAPVHEPPSPRSPRAACSDPGASGRAQLRTGDGVLVPGS

SEQ ID NO: 191 - protein, 647 aa, Homo sapiens
MAEEEAPKKSRAAGGGASWELCAGALSARLAEEGSGDAGGRRRPPVDPRRLARQLLLLLWLLEAPLLLGVRAQAAGQGPGQGPGPGQQPPPPPQQQQSGQQYNGERGISVPDHGYCQPISIPLCTDIAYNQTIMPNLLGHTNQEDAGLEVHQFYPLVKVQCSAELKFFLCSMYAPVCTVLEQALPPCRSLCERARQGCEALMNKFGFQWPDTLKCEKFPVHGAGELCVGQNTSDKGTPTPSLLPEFWTSNPQHGGGGHRGGFPGGAGASERGKFSCPRALKVPSYLNYHFLGEKDCGAPCEPTKVYGLMYFGPEELRFSRTWIGIWSVLCCASTLFTVLTYLVDMRRFSYPERPIIFLSGCYTAVAVAYIAGFLLEDRVVCNDKFAEDGARTVAQGTKKEGCTILFMMLYFFSMASSIWWVILSLTWFLAAGMKWGHEAIEANSQYFHLAAWAVPAIKTITILALGQVDGDVLSGVCFVGLNNVDALRGFVLAPLFVYLFIGTSFLLAGFVSLFRIRTIMKHDGTKTEKLEKLMVRIGVFSVLYTVPATIVIACYFYEQAFRDQWERSWVAQSCKSYAIPCPHLQAGGGAPPHPPMSPDFTVFMIKYLMTLIVGITSGFWIWSGKTLNSWRKFYTRLTNSKQGETTV

SEQ ID NO: 192 - protein, 565 aa, Homo sapiens
MRPRSALPRLLLPLLLLPAAGPAQFHGEKGISIPDHGFCQPISIPLCTDIAYNQTIMPNLLGHTNQEDAGLEVHQFYPLVKVQCSPELRFFLCSMYAPVCTVLEQAIPPCRSICERARQGCEALMNKFGFQWPERLRCEHFPRHGAEQICVGQNHSEDGAPALLTTAPPPGLQPGAGGTPGGPGGGGAPPRYATLEHPFHCPRVLKVPSYLSYKFLGERDCAAPCEPARPDGSMFFSQEETRFARLWILTWSVLCCASTFFTVTTYLVDMQRFRYPERPIIFLSGCYTMVSVAYIAGFVLQERVVCNERFSEDGYRTVVQGTKKEGCTILFMMLYFFSMASSIWWVILSLTWFLAAGMKWGHEAIEANSQYFHLAAWAVPAVKTITILAMGQIDGDLLSGVCFVGLNSLDPLRGFVLAPLFVYLFIGTSFLLAGFVSLFRIRTIMKHDGTKTEKLERLMVRIGVFSVLYTVPATIVIACYFYEQAFREHWERSWVSQHCKSLAIPCPAHYTPRMSPDFTVYMIKYLMTLIVGITSGFWIWSGKTLHSWRKFYTRLTNSRHGETTV

SEQ ID NO: 193 - protein, 666 aa, Homo sapiens
MAMTWIVFSLWPLTVFMGHIGGHSLFSCEPITLRMCQDLPYNTTFMPNLLNHYDQQTAALAMEPFHPMVNLDCSRDFRPFLCALYAPICMEYGRVTLPCRRLCQRAYSECSKLMEMFGVPWPEDMECSRFPDCDEPYPRLVDLNLAGEPTEGAPVAVQRDYGFWCPRELKIDPDLGYSFLHVRDCSPPCPNMYFRREELSFARYFIGLISIICLSATLFTFLTFLIDVTRFRYPERPIIFYAVCYMMVSLIFFIGFLLEDRVACNASIPAQYKASTVTQGSHNKACTMLFMILYFFTMAGSVWWVILTITWFLAAVPKWGSEAIEKKALLFHASAWGIPGTLTIILLAMNKIEGDNISGVCFVGLYDVDALRYFVLAPLCLYVVVGVSLLLAGIISLNRVRIEIPLEKENQDKLVKFMIRIGVFSILYLVPLLVVIGCYFYEQAYRGIWETTWIQERCREYHIPCPYQVTQMSRPDLILFLMKYLMALIVGIPSVFWVGSKKTCFEWASFFHGRRKKEIVNESRQVLQEPDFAQSLLRDPNTPIIRKSRGTSTQGTSTHASSTQLAMVDDQRSKAGSIHSKVSSYHGSLHRSRDGRYTPCSYRGMEERLPHGSMSRLTDHSRHSSSHRLNEQSRHSSIRDLSNNPMTHITHGTSMNRVIEEDGTSA

SEQ ID NO: 194 - protein, 537 aa, Homo sapiens
MAWRGAGPSVPGAPGGVGLSLGLLLQLLLLLGPARGFGDEEERRCDPIRISMCQNLGYNVTKMPNLVGHELQTDAELQLTTFTPLIQYGCSSQLQFFLCSVYVPMCTEKINIPIGPCGGMCLSVKRRCEPVLKEFGFAWPESLNCSKFPPQNDHNHMCMEGPGDEEVPLPHKTPIQPGEECHSVGTNSDQYIWVKRSLNCVLKCGYDAGLYSRSAKEFTDIWMAVWASLCFISTAFTVLTFLIDSSRFSYPERPIIFLSMCYNIYSIAYIVRLTVGRERISCDFEEAAEPVLIQEGLKNTGCAIIFLLMYFFGMASSIWWVILTLTWFLAAGLKWGHEAIEMHSSYFHIAAWAIPAVKTIVILIMRLVDADELTGLCYVGNQNLDALTGFVVAPLFTYLVIGTLFIAAGLVALFKIRSNLQKDGTKTDKLERLMVKIGVFSVLYTVPATCVIACYFYEISNWALFRYSADDSNMAVEMLKIFMSLLVGITSGMWIWSAKTLHTWQKCSNRLVNSGKVKREKRGNGWVKPGKGSETVV

SEQ ID NO: 195 - protein, 585 aa, Homo sapiens
MARPDPSAPPSLLLLLLAQLVGRAAAASKAPVCQEITVPMCRGIGYNLTHMPNQFNHDTQDEAGLEVHQFWPLVEIQCSPDLRFFLCSMYTPICLPDYHKPLPPCRSVCERAKAGCSPLMRQYGFAWPERMSCDRLPVLGRDAEVLCMDYNRSEATTAPPRPFPAKPTLPGPPGAPASGGECPAGGPFVCKCREPFVPILKESHPLYNKVRTGQVPNCAVPCYQPSFSADERTFATFWIGLWSVLCFISTSTTVATFLIDMERFRYPERPIIFLSACYLCVSLGFLVRLVVGHASVACSREHNHIHYETTGPALCTIVFLLVYFFGMASSIWWVILSLTWFLAAGMKWGNEAIAGYAQYFHLAAWLIPSVKSITALALSSVDGDPVAGICYVGNQNLNSLRGFVLGPLVLYLLVGTLFLLAGFVSLFRIRSVIKQGGTKTDKLEKLMIRIGIFTLLYTVPASIVVACYLYEQHYRESWEAALTCACPGHDTGQPRAKPEYWVLMLKYFMCLVVGITSGVWIWSGKTVESWRRFTSRCCCRPRRGHKSGGAMAAGDYPEASAALTGRTGPPGPAATYHKQVSLSHV

SEQ ID NO: 196 - protein, 706 aa, Homo sapiens
MEMFTFLLTCIFLPLLRGHSLFTCEPITVPRCMKMAYNMTFFPNLMGHYDQSIAAVEMEHFLPLANLECSPNIETFLCKAFVPTCIEQIHVVPPCRKLCEKVYSDCKKLIDTFGIRWPEELECDRLQYCDETVPVTFDPHTEFLGPQKKTEQVQRDIGFWCPRHLKTSGGQGYKFLGIDQCAPPCPNMYFKSDELEFAKSFIGTVSIFCLCATLFTFLTFLIDVRRFRYPERPIIYYSVCYSIVSLMYFIGFLLGDSTACNKADEKLELGDTVVLGSQNKACTVLFMLLYFFTMAGTVWWVILTITWFLAAGRKWSCEAIEQKAVWFHAVAWGTPGFLTVMLLAMNKVEGDNISGVCFVGLYDLDASRYFVLLPLCLCVFVGLSLLLAGIISLNHVRQVIQHDGRNQEKLKKFMIRIGVFSGLYLVPLVTLLGCYVYEQVNRITWEITWVSDHCRQYHIPCPYQAKAKARPELALFMIKYLMTLIVGISAVFWVGSKKTCTEWAGFFKRNRKRDPISESRRVLQESCEFFLKHNSKVKHKKKHYKPSSHKLKVISKSMGTSTGATANHGTSAVAITSHDYLGQETLTEIQTSPETSMREVKADGASTPRLREQDCGEPASPAASISRLSGEQVDGKGQAGSVSESARSEGRISPKSDITDTGLAQSNNLQVPSSSEPSSLKGSTSLLVHPVSGVRKEQGGGCHSDT

SEQ ID NO: 197 - protein, 574 aa, Homo sapiens
MRDPGAAAPLSSLGLCALVLALLGALSAGAGAQPYHGEKGISVPDHGFCQPISIPLCTDIAYNQTILPNLLGHTNQEDAGLEVHQFYPLVKVQCSPELRFFLCSMYAPVCTVLDQAIPPCRSLCERARQGCEALMNKFGFQWPERLRCENFPVHGAGEICVGQNTSDGSGGPGGGPTAYPTAPYLPDLPFTALPPGASDGRGRPAFPFSCPRQLKVPPYLGYRFLGERDCGAPCEPGRANGLMYFKEEERRFARLWVGVWSVLCCASTLFTVLTYLVDMRRFSYPERPIIFLSGCYFMVAVAHVAGFLLEDRAVCVERFSDDGYRTVAQGTKKEGCTILFMVLYFFGMASSIWWVILSLTWFLAAGMKWGHEAIEANSQYFHLAAWAVPAVKTITILAMGQVDGDLLSGVCYVGLSSVDALRGFVLAPLFVYLFIGTSFLLAGFVSLFRIRTIMKHDGTKTEKLEKLMVRIGVFSVLYTVPATIVLACYFYEQAFREHWERTWLLQTCKSYAVPCPPGHFPPMSPDFTVFMIKYLMTMIVGITTGFWIWSGKTLQSWRRFYHRLSHSSKGETAV

SEQ ID NO: 198 - protein, 694 aa, Homo sapiens
MEWGYLLEVTSLLAALALLQRSSGAAAASAKELACQEITVPLCKGIGYNYTYMPNQFNHDTQDEAGLEVHQFWPLVEIQCSPDLKFFLCSMYTPICLEDYKKPLPPCRSVCERAKAGCAPLMRQYGFAWPDRMRCDRLPEQGNPDTLCMDYNRTDLTTAAPSPPRRLPPPPPGEQPPSGSGHGRPPGARPPHRGGGRGGGGGDAAAPPARGGGGGGKARPPGGGAAPCEPGCQCRAPMVSVSSERHPLYNRVKTGQIANCALPCHNPFFSQDERAFTVFWIGLWSVLCFVSTFATVSTFLIDMERFKYPERPIIFLSACYLFVSVGYLVRLVAGHEKVACSGGAPGAGGAGGAGGAAAGAGAAGAGAGGPGGRGEYEELGAVEQHVRYETTGPALCTVVFLLVYFFGMASSIWWVILSLTWFLAAGMKWGNEAIAGYSQYFHLAAWLVPSVKSIAVLALSSVDGDPVAGICYVGNQSLDNLRGFVLAPLVIYLFIGTMFLLAGFVSLFRIRSVIKQQDGPTKTHKLEKLMIRLGLFTVLYTVPAAVVVACLFYEQHNRPRWEATHNCPCLRDLQPDQARRPDYAVFMLKYFMCLVVGITSGVWVWSGKTLESWRSLCTRCCWASKGAAVGGGAGATAAGGGGGPGGGGGGGPGGGGGPGGGGGSLYSDVSTGLTWRSGTASSVSYPKQMPLSQV

SEQ ID NO: 199 - protein, 591 aa, Homo sapiens
MAVAPLRGALLLWQLLAAGGAALEIGRFDPERGRGAAPCQAVEIPMCRGIGYNLTRMPNLLGHTSQGEAAAELAEFAPLVQYGCHSHLRFFLCSLYAPMCTDQVSTPIPACRPMCEQARLRCAPIMEQFNFGWPDSLDCARLPTRNDPHALCMEAPENATAGPAEPHKGLGMLPVAPRPARPPGDLGPGAGGSGTCENPEKFQYVEKSRSCAPRCGPGVEVFWSRRDKDFALVWMAVWSALCFFSTAFTVLTFLLEPHRFQYPERPIIFLSMCYNVYSLAFLIRAVAGAQSVACDQEAGALYVIQEGLENTGCTLVFLLLYYFGMASSLWWVVLTLTWFLAAGKKWGHEAIEAHGSYFHMAAWGLPALKTIVILTLRKVAGDELTGLCYVASTDAAALTGFVLVPLSGYLVLGSSFLLTGFVALFHIRKIMKTGGTNTEKLEKLMVKIGVFSILYTVPATCVIVCYVYERLNMDFWRLRATEQPCAAAAGPGGRRDCSLPGGSVPTVAVFMLKIFMSLVVGITSGVWVWSSKTFQTWQSLCYRKIAAGRARAKACRAPGSYGRGTHCHYKAPTVVLHMTKTDPSLENPTHL

SEQ ID NO: 200 - protein, 325 aa, Homo sapiens
MVCGSPGGMLLLRAGLLALAALCLLRVPGARAAACEPVRIPLCKSLPWNMTKMPNHLHHSTQANAILAIEQFEGLLGTHCSPDLLFFLCAMYAPICTIDFQHEPIKPCKSVCERARQGCEPILIKYRHSWPENLACEELPVYDRGVCISPEAIVTADGADFPMDSSNGNCRGASSERCKCKPIRATQKTYFRNNYNYVIRAKVKEIKTKCHDVTAVVEVKEILKSSLVNIPRDTVNLYTSSGCLCPPLNVNEEYIIMGYEDEERSRLLLVEGSIAEKWKDRLGKKVKRWDMKLRHLGLSKSDSSNSDSTQSQKSGRNSNPRQARN

SEQ ID NO: 201 - protein, 1106 aa, Homo sapiens
MFNSMTPPPISSYGEPCCLRPLPSQGAPSVGTEGLSGPPFCHQANLMSGPHSYGPARETNSCTEGPLFSSPRSAVKLTKKRALSISPLSDASLDLQTVIRTSPSSLVAFINSRCTSPGGSYGHLSIGTMSPSLGFPAQMNHQKGPSPSFGVQPCGPHDSARGGMIPHPQSRGPFPTCQLKSELDMLVGKCREEPLEGDMSSPNSTGIQDPLLGMLDGREDLEREEKREPESVYETDCRWDGCSQEFDSQEQLVHHINSEHIHGERKEFVCHWGGCSRELRPFKAQYMLVVHMRRHTGEKPHKCTFEGCRKSYSRLENLKTHLRSHTGEKPYMCEHEGCSKAFSNASDRAKHQNRTHSNEKPYVCKLPGCTKRYTDPSSLRKHVKTVHGPDAHVTKRHRGDGPLPRAPSISTVEPKREREGGPIREESRLTVPEGAMKPQPSPGAQSSCSSDHSPAGSAANTDSGVEMTGNAGGSTEDLSSLDEGPCIAGTGLSTLRRLENLRLDQLHQLRPIGTRGLKLPSLSHTGTTVSRRVGPPVSLERRSSSSSSISSAYTVSRRSSLASPFPPGSPPENGASSLPGLMPAQHYLLRARYASARGGGTSPTAASSLDRIGGLPMPPWRSRAEYPGYNPNAGVTRRASDPAQAADRPAPARVQRFKSLGCVHTPPTVAGGGQNFDPYLPTSVYSPQPPSITENAAMDARGLQEEPEVGTSMVGSGLNPYMDFPPTDTLGYGGPEGAAAEPYGARGPGSLPLGPGPPTNYGPNPCPQQASYPDPTQETWGEFPSHSGLYPGPKALGGTYSQCPRLEHYGQVQVKPEQGCPVGSDSTGLAPCLNAHPSEGPPHPQPLFSHYPQPSPPQYLQSGPYTQPPPDYLPSEPRPCLDFDSPTHSTGQLKAQLVCNYVQSQQELLWEGGGREDAPAQEPSYQSPKFLGGSQVSPSRAKAPVNTYGPGFGPNLPNHKSGSYPTPSPCHENFVVGANRASHRAAAPPRLLPPLPTCYGPLKVGGTNPSCGHPEVGRLGGGPALYPPPEGQVCNPLDSLDLDNTQLDFVAILDEPQGLSPPPSHDQRGSSGHTPPPSGPPNMAVGNMSVLLRSLPGETEFLNSSA

SEQ ID NO: 202 - protein, 483 aa, Homo sapiens
MSGGGPSGGGPGGSGRARTSSFAEPGGGGGGGGGGPGGSASGPGGTGGGKASVGAMGGGVGASSSGGGPGGSGGGGSGGPGAGTSFPPPGVKLGRDSGKVTTVVATLGQGPERSQEVAYTDIKVIGNGSFGVVYQARLAETRELVAIKKVLQDKRFKNRELQIMRKLDHCNIVRLRYFFYSSGEKKDELYLNLVLEYVPETVYRVARHFTKAKLTIPILYVKVYMYQLFRSLAYIHSQGVCHRDIKPQNLLVDPDTAVLKLCDFGSAKQLVRGEPNVSYICSRYYRAPELIFGATDYTSSIDVWSAGCVLAELLLGQPIFPGDSGVDQLVEIIKVLGTPTREQIREMNPNYTEFKFPQIKAHPWTKVFKSRTPPEAIALCSSLLEYTPSSRLSPLEACAHSFFDELRCLGTQLPNNRPLPPLFNFSAGELSIQPSLNAILIPPHLRSPAGTTTLTPSSQALTETPTSSDWQSTDATPTLTNSS

SEQ ID NO: 203 - protein, 433 aa, Homo sapiens
MSGRPRTTSFAESCKPVQQPSAFGSMKVSRDKDGSKVTTVVATPGQGPDRPQEVSYTDTKVIGNGSFGVVYQAKLCDSGELVAIKKVLQDKRFKNRELQIMRKLDHCNIVRLRYFFYSSGEKKDEVYLNLVLDYVPETVYRVARHYSRAKQTLPVIYVKLYMYQLFRSLAYIHSFGICHRDIKPQNLLLDPDTAVLKLCDFGSAKQLVRGEPNVSYICSRYYRAPELIFGATDYTSSIDVWSAGCVLAELLLGQPIFPGDSGVDQLVEIIKVLGTPTREQIREMNPNYTEFKFPQIKAHPWTKDSSGTGHFTSGVRVFRPRTPPEAIALCSRLLEYTPTARLTPLEACAHSFFDELRDPNVKLPNGRDTPALFNFTTQELSSNPPLATILIPPHARIQAAASTPTNATAASDANTGDRGQTNNAASASASNST

SEQ ID NO: 204 - protein, 1189 aa, Homo sapiens
MESTPSFLKGTPTWEKTAPENGIVRQEPGSPPRDGLHHGPLCLGEPAPFWRGVLSTPDSWLPPGFPQGPKDMLPLVEGEGPQNGERKVNWLGSKEGLRWKEAMLTHPLAFCGPACPPRCGPLMPEHSGGHLKSDPVAFRPWHCPFLLETKILERAPFWVPTCLPPYLVSGLPPEHPCDWPLTPHPWVYSGGQPKVPSAFSLGSKGFYYKDPSIPRLAKEPLAAAEPGLFGLNSGGHLQRAGEAERPSLHQRDGEMGAGRQQNPCPLFLGQPDTVPWTSWPACPPGLVHTLGNVWAGPGDGNLGYQLGPPATPRCPSPEPPVTQRGCCSSYPPTKGGGLGPCGKCQEGLEGGASGASEPSEEVNKASGPRACPPSHHTKLKKTWLTRHSEQFECPRGCPEVEERPVARLRALKRAGSPEVQGAMGSPAPKRPPDPFPGTAEQGAGGWQEVRDTSIGNKDVDSGQHDEQKGPQDGQASLQDPGLQDIPCLALPAKLAQCQSCAQAAGEGGGHACHSQQVRRSPLGGELQQEEDTATNSSSEEGPGSGPDSRLSTGLAKHLLSGLGDRLCRLLRREREALAWAQREGQGPAVTEDSPGIPRCCSRCHHGLFNTHWRCPRCSHRLCVACGRVAGTGRAREKAGFQEQSAEECTQEAGHAACSLMLTQFVSSQALAELSTAMHQVWVKFDIRGHCPCQADARVWAPGDAGQQKESTQKTPPTPQPSCNGDTHRTKSIKEETPDSAETPAEDRAGRGPLPCPSLCELLASTAVKLCLGHERIHMAFAPVTPALPSDDRITNILDSIIAQVVERKIQEKALGPGLRAGPGLRKGLGLPLSPVRPRLPPPGALLWLQEPQPCPRRGFHLFQEHWRQGQPVLVSGIQRTLQGNLWGTEALGALGGQVQALSPLGPPQPSSLGSTTFWEGFSWPELRPKSDEGSVLLLHRALGDEDTSRVENLAASLPLPEYCALHGKLNLASYLPPGLALRPLEPQLWAAYGVSPHRGHLGTKNLCVEVADLVSILVHADTPLPAWHRAQKDFLSGLDGEGLWSPGSQVSTVWHVFRAQDAQRIRRFLQMVCPAGAGALEPGAPGSCYLDAGLRRRLREEWGVSCWTLLQAPGEAVLVPAGAPHQVQGLVSTVSVTQHFLSPETSALSAQLCHQGPSLPPDCHLLYAQMDWAVFQAVKVAVGTLQEAK

SEQ ID NO: 205 - protein, 280 aa, Homo sapiens
MPADIMEKNSSSPVAATPASVNTTPDKPKTASEHRKSSKPIMEKRRRARINESLSQLKTLILDALKKDSSRHSKLEKADILEMTVKHLRNLQRAQMTAALSTDPSVLGKYRAGFSECMNEVTRFLSTCEGVNTEVRTRLLGHLANCMTQINAMTYPGQPHPALQAPPPPPPGPGGPQHAPFAPPPPLVPIPGGAAPPPGGAPCKLGSQAGEAAKVFGGFQVVPAPDGQFAFLIPNGAFAHSGPVIPVYTSNSGTSVGPNAVSPSSGPSLTADSMWRPWRN

SEQ ID NO: 206 - protein, 166 aa, Homo sapiens
MAPSTVAVELLSPKEKNRLRKPVVEKMRRDRINSSIEQLKLLLEQEFARHQPNSKLEKADILEMAVSYLKHSKAFVAAAGPKSLHQDYSEGYSWCLQEAVQFLTLHAASDTQMKLLYHFQRPPAAPAAPAKEPKAPGAAPPPALSAKATAAAAAAHQPACGLWRPW

SEQ ID NO: 207 - protein, 308 aa, Homo sapiens
MKRAHPEYSSSDSELDETIEVEKESADENGNLSSALGSMSPTTSSQILARKRRRGIIEKRRRDRINNSLSELRRLVPSAFEKQVMEQGSAKLEKAEILQMTVDHLKMLHTAGGKGYFDAHALAMDYRSLGFRECLAEVARYLSIIEGLDASDPLRVRLVSHLNNYASQREAASGAHAGLGHIPWGTVFGHHPHIAHPLLLPQNGHGNAGTTASPTEPHHQGRLGSAHPEAPALRAPPSGSLGPVLPVVTSASKLSPPLLSSVASLSAFPFSFGSFHLLSPNALSPSAPTQAANLGKPYRPWGTEIGAF

SEQ ID NO: 208 - protein, 337 aa, Homo sapiens
MKRPCEETTSESDMDETIDVGSENNYSGQSTSSVIRLNSPTTTSQIMARKKRRGIIEKRRRDRINNSLSELRRLVPTAFEKQGSAKLEKAEILQMTVDHLKMLQATGGKGYFDAHALAMDFMSIGFRECLTEVARYLSSVEGLDSSDPLRVRLVSHLSTCATQREAAAMTSSMAHHHHPLHPHHWAAAFHHLPAALLQPNGLHASESTPCRLSTTSEVPPAHGSALLTATFAHADSALRMPSTGSVAPCVPPLSTSLLSLSATVHAAAAAATAAAHSFPLSFAGAFPMLPPNAAAAVAAATAISPPLSVSATSSPQQTSSGTNNKPYRPWGTEVGAF

SEQ ID NO: 209 - protein, 328 aa, Homo sapiens
MKRPKEPSGSDGESDGPIDVGQEGQLSQMARPLSTPSSSQMQARKKRRGIIEKRRRDRINSSLSELRRLVPTAFEKQGSSKLEKAEVLQMTVDHLKMLHATGGTGFFDARALAVDFRSIGFRECLTEVIRYLGVLEGPSSRADPVRIRLLSHLNSYAAEMEPSPTPTGPLAFPAWPWSFFHSCPGLPALSNQLAILGRVPSPVLPGVSSPAYPIPALRTAPLRRATGIILPARRNVLPSRGASSTRRARPLERPATPVPVAPSSRAARSSHIAPLLQSSSPTPPGPTGSAAYVAVPTPNSSSPGPAGRPAGAMLYHSWVSEITEIGAF

SEQ ID NO: 210 - protein, 482 aa, Homo sapiens
MAQTQGTRRKVCYYYDGDVGNYYYGQGHPMKPHRIRMTHNLLLNYGLYRKMEIYRPHKANAEEMTKYHSDDYIKFLRSIRPDNMSEYSKQMQRFNVGEDCPVFDGLFEFCQLSTGGSVASAVKLNKQQTDIAVNWAGGLHHAKKSEASGFCYVNDIVLAILELLKYHQRVLYIDIDIHHGDGVEEAFYTTDRVMTVSFHKYGEYFPGTGDLRDIGAGKGKYYAVNYPLRDGIDDESYEAIFKPVMSKVMEMFQPSAVVLQCGSDSLSGDRLGCFNLTIKGHAKCVEFVKSFNLPMLMLGGGGYTIRNVARCWTYETAVALDTEIPNELPYNDYFEYFGPDFKLHISPSNMTNQNTNEYLEKIKQRLFENLRMLPHAPGVQMQAIPEDAIPEESGDEDEDDPDKRISICSSDKRIACEEEFSDSEEEGEGGRKNSSNFKKAKRVKTEDEKEKDPEEKKEVTEEEKTKEEKPEAKGVKEEVKLA

SEQ ID NO: 211 - protein, 251 aa, Homo sapiens
MAMSSFLINSNYVDPKFPPCEEYSQSDYLPSDHSPGYYAGGQRRESSFQPEAGFGRRAACTVQRYAACRDPGPPPPPPPPPPPPPPPGLSPRAPAPPPAGALLPEPGQRCEAVSSSPPPPPCAQNPLHPSPSHSACKEPVVYPWMRKVHVSTVNPNYAGGEPKRSRTAYTRQQVLELEKEFHYNRYLTRRRRVEIAHALCLSERQIKIWFQNRRMKWKKDHKLPNTKIRSGGAAGSAGGPPGRPNGGPRAL

SEQ ID NO: 212 - protein, 155 aa, Homo sapiens
MKVASGSTATAAAGPSCALKAGKTASGAGEVVRCLSEQSVAISRCAGGAGARLPALLDEQQVNVLLYDMNGCYSRLKELVPTLPQNRKVSKVEILQHVIDYIRDLQLELNSESEVGTPGGRGLPVRAPLSTLNGEISALTAEAACVPADDRILCR

SEQ ID NO: 213 - protein, 166 aa, Homo sapiens
MKYTSYILAFQLCIVLGSLGCYCQDPYVKEAENLKKYFNAGHSDVADNGTLFLGILKNWKEESDRKIMQSQIVSFYFKLFKNFKDDQSIQKSVETIKEDMNVKFFNSNKKKRDDFEKLTNYSVTDLNVQRKAIHELIQVMAELSPAAKTGKRKRSQMLFRGRRASQ

SEQ ID NO: 214 - protein, 180 aa, Homo sapiens
MDWPHNLLFLLTISIFLGLGQPRSPKSKRKGQGRPGPLAPGPHQVPLDLVSRMKPYARMEEYERNIEEMVAQLRNSSELAQRKCEVNLQLWMSNKRSLSPWGYSINHDPSRIPVDLPEARCLCLGCVNPFTMQEDRSMVSVPVFSQVPVRRRLCPPPPRTGPCRQRAVMETIAVGCTCIF

SEQ ID NO: 215 - protein, 272 aa, Homo sapiens
MDSYLLMWGLLTFIMVPGCQAELCDDDPPEIPHATFKAMAYKEGTMLNCECKRGFRRIKSGSLYMLCTGNSSHSSWDNQCQCTSSATRNTTKQVTPQPEEQKERKTTEMQSPMQPVDQASLPGHCREPPPWENEATERIYHFVVGQMVYYQCVQGYRALHRGPAESVCKMTHGKTRWTQPQLICTGEMETSQFPGEEKPQASPEGRPESETSCLVTTTDFQIQTEMAATMETSIFTTEYQVAVAGCVFLLISVLLLSGLTWQRRQRKSRRTI

SEQ ID NO: 216 - protein, 1218 aa, Homo sapiens
MRSPRTRGRSGRPLSLLLALLCALRAKVCGASGQFELEILSMQNVNGELQNGNCCGGARNPGDRKCTRDECDTYFKVCLKEYQSRVTAGGPCSFGSGSTPVIGGNTFNLKASRGNDRNRIVLPFSFAWPRSYTLLVEAWDSSNDTVQPDSIIEKASHSGMINPSRQWQTLKQNTGVAHFEYQIRVTCDDYYYGFGCNKFCRPRDDFFGHYACDQNGNKTCMEGWMGPECNRAICRQGCSPKHGSCKLPGDCRCQYGWQGLYCDKCIPHPGCVHGICNEPWQCLCETNWGGQLCDKDLNYCGTHQPCLNGGTCSNTGPDKYQCSCPEGYSGPNCEIAEHACLSDPCHNRGSCKETSLGFECECSPGWTGPTCSTNIDDCSPNNCSHGGTCQDLVNGFKCVCPPQWTGKTCQLDANECEAKPCVNAKSCKNLIASYYCDCLPGWMGQNCDININDCLGQCQNDASCRDLVNGYRCICPPGYAGDHCERDIDECASNPCLNGGHCQNEINRFQCLCPTGFSGNLCQLDIDYCEPNPCQNGAQCYNRASDYFCKCPEDYEGKNCSHLKDHCRTTPCEVIDSCTVAMASNDTPEGVRYISSNVCGPHGKCKSQSGGKFTCDCNKGFTGTYCHENINDCESNPCRNGGTCIDGVNSYKCICSDGWEGAYCETNINDCSQNPCHNGGTCRDLVNDFYCDCKNGWKGKTCHSRDSQCDEATCNNGGTCYDEGDAFKCMCPGGWEGTTCNIARNSSCLPNPCHNGGTCVVNGESFTCVCKEGWEGPICAQNTNDCSPHPCYNSGTCVDGDNWYRCECAPGFAGPDCRININECQSSPCAFGATCVDEINGYRCVCPPGHSGAKCQEVSGRPCITMGSVIPDGAKWDDDCNTCQCLNGRIACSKVWCGPRPCLLHKGHSECPSGQSCIPILDDQCFVHPCTGVGECRSSSLQPVKTKCTSDSYYQDNCANITFTFNKEMMSPGLTTEHICSELRNLNILKNVSAEYSIYIACEPSPSANNEIHVAISAEDIRDDGNPIKEITDKIIDLVSKRDGNSSLIAAVAEVRVQRRPLKNRTDFLVPLLSSVLTVAWICCLVTAFYWCLRKRRKPGSHTHSASEDNTTNNVREQLNQIKNPIEKHGANTVPIKDYENKNSKMSKIRTHNSEVEEDDMDKHQQKARFAKQPAYTLVDREEKPPNGTPTKHPNWTNKQDNRDLESAQSLNRMEYIV

SEQ ID NO: 217 - protein, 1238 aa, Homo sapiens
MRAQGRGRLPRRLLLLLALWVQAARPMGYFELQLSALRNVNGELLSGACCDGDGRTTRAGGCGHDECDTYVRVCLKEYQAKVTPTGPCSYGHGATPVLGGNSFYLPPAGAAGDRARARARAGGDQDPGLVVIPFQFAWPRSFTLIVEAWDWDNDTTPNEELLIERVSHAGMINPEDRWKSLHFSGHVAHLELQIRVRCDENYYSATCNKFCRPRNDFFGHYTCDQYGNKACMDGWMGKECKEAVCKQGCNLLHGGCTVPGECRCSYGWQGRFCDECVPYPGCVHGSCVEPWQCNCETNWGGLLCDKDLNYCGSHHPCTNGGTCINAEPDQYRCTCPDGYSGRNCEKAEHACTSNPCANGGSCHEVPSGFECHCPSGWSGPTCALDIDECASNPCAAGGTCVDQVDGFECICPEQWVGATCQLDANECEGKPCLNAFSCKNLIGGYYCDCIPGWKGINCHINVNDCRGQCQHGGTCKDLVNGYQCVCPRGFGGRHCELERDECASSPCHSGGLCEDLADGFHCHCPQGFSGPLCEVDVDLCEPSPCRNGARCYNLEGDYYCACPDDFGGKNCSVPREPCPGGACRVIDGCGSDAGPGMPGTAASGVCGPHGRCVSQPGGNFSCICDSGFTGTYCHENIDDCLGQPCRNGGTCIDEVDAFRCFCPSGWEGELCDTNPNDCLPDPCHSRGRCYDLVNDFYCACDDGWKGKTCHSREFQCDAYTCSNGGTCYDSGDTFRCACPPGWKGSTCAVAKNSSCLPNPCVNGGTCVGSGASFSCICRDGWEGRTCTHNTNDCNPLPCYNGGICVDGVNWFRCECAPGFAGPDCRINIDECQSSPCAYGATCVDEINGYRCSCPPGRAGPRCQEVIGFGRSCWSRGTPFPHGSSWVEDCNSCRCLDGRRDCSKVWCGWKPCLLAGQPEALSAQCPLGQRCLEKAPGQCLRPPCEAWGECGAEEPPSTPCLPRSGHLDNNCARLTLHFNRDHVPQGTTVGAICSGIRSLPATRAVARDRLLVLLCDRASSGASAVEVAVSFSPARDLPDSSLIQGAAHAIVAAITQRGNSSLLLAVTEVKVETVVTGGSSTGLLVPVLCGAFSVLWLACVVLCVWWTRKRRKERERSRLPREESANNQWAPLNPIRNPIERPGGHKDVLYQCKNFTPPPRRADEALPGPAGHAAVREDEEDEDLGRGEEDSLEAEKFLSHKFTKDPGRSPGRPAHWASGPKVDNRAVRSINEARYAGKE

SEQ ID NO: 218 - protein, 331 aa, Homo sapiens
MTAKMETTFYDDALNASFLPSESGPYGYSNPKILKQSMTLNLADPVGSLKPHLRAKNSDLLTSPDVGLLKLASPELERLIIQSSNGHITTTPTPTQFLCPKNVTDEQEGFAEGFVRALAELHSQNTLPSVTSAAQPVNGAGMVAPAVASVAGGSGSGGFSASLHSEPPVYANLSNFNPGALSSGGGAPSYGAAGLAFPAQPQQQQQPPHHLPQQMPVQHPRLQALKEEPQTVPEMPGETPPLSPIDMESQERIKAERKRMRNRIAASKCRKRKLERIARLEEKVKTLKAQNSELASTANMLREQVAQLKQKVMNHVNSGCQLMLTQQLQTF

SEQ ID NO: 219 - protein, 644 aa, Homo sapiens
MSRQFSSRSGYRSGGGFSSGSAGIINYQRRTTSSSTRRSGGGGGRFSSCGGGGGSFGAGGGFGSRSLVNLGGSKSISISVARGGGRGSGFGGGYGGGGFGGGGFGGGGFGGGGIGGGGFGGFGSGGGGFGGGGFGGGGYGGGYGPVCPPGGIQEVTINQSLLQPLNVEIDPEIQKVKSREREQIKSLNNQFASFIDKVRFLEQQNQVLQTKWELLQQVDTSTRTHNLEPYFESFINNLRRRVDQLKSDQSRLDSELKNMQDMVEDYRNKYEDEINKRTNAENEFVTIKKDVDGAYMTKVDLQAKLDNLQQEIDFLTALYQAELSQMQTQISETNVILSMDNNRSLDLDSIIAEVKAQYEDIAQKSKAEAESLYQSKYEELQITAGRHGDSVRNSKIEISELNRVIQRLRSEIDNVKKQISNLQQSISDAEQRGENALKDAKNKLNDLEDALQQAKEDLARLLRDYQELMNTKLALDLEIATYRTLLEGEESRMSGECAPNVSVSVSTSHTTISGGGSRGGGGGGYGSGGSSYGSGGGSYGSGGGGGGGRGSYGSGGSSYGSGGGSYGSGGGGGGHGSYGSGSSSGGYRGGSGGGGGGSSGGRGSGGGSSGGSIGGRGSSSGGVKSSGGSSSVKFVSTTYSGVTR

SEQ ID NO: 220 - protein, 492 aa, Homo sapiens
MAPPAARLALLSAAALTLAARPAPSPGLGPGPECFTANGADYRGTQNWTALQGGKPCLFWNETFQHPYNTLKYPNGEGGLGEHNYCRNPDGDVSPWCYVAEHEDGVYWKYCEIPACQMPGNLGCYKDHGNPPPLTGTSKTSNKLTIQTCISFCRSQRFKFAGMESGYACFCGNNPDYWKYGEAASTECNSVCFGDHTQPCGGDGRIILFDTLVGACGGNYSAMSSVVYSPDFPDTYATGRVCYWTIRVPGASHIHFSFPLFDIRDSADMVELLDGYTHRVLARFHGRSRPPLSFNVSLDFVILYFFSDRINQAQGFAVLYQAVKEELPQERPAVNQTVAEVITEQANLSVSAARSSKVLYVITTSPSHPPQTVPGSNSWAPPMGAGSHRVEGWTVYGLATLLILTVTAIVAKILLHVTFKSHRVPASGDLRDCHQPGTSGEIWSIFYKPSTSISIFKKKLKGQSQQDDRNPLAIQDSEVTSLIWSQGQPRSI

SEQ ID NO: 221 - protein, 379 aa, Homo sapiens
MLKRCGRRLLLALAGALLACLLVLTADPPPPPLPAERGRRALRSLAGPAGAAPAPGLGAAAAAPGALVRDVHSLSEYFSLLTRARRDAGPPPGAAPRPADGHPRPLAEPLAPRDVFIAVKTTKKFHRARLDLLLETWISRHKEMTFIFTDGEDEALARHTGNVVITNCSAAHSRQALSCKMAVEYDRFIESGRKWFCHVDDDNYVNLRALLRLLASYPHTRDVYVGKPSLDRPIQAMERVSENKVRPVHFWFATGGAGFCISRGLALKMSPWASGGHFMNTAERIRLPDDCTIGYIVEALLGVPLIRSGLFHSHLENLQQVPTSELHEQVTLSYGMFENKRNAVHVKGPFSVEADPSRFRSIHCHLYPDTPWCPRTAIF

SEQ ID NO: 222 - protein, 227 aa, Homo sapiens
MEGSAVTVLERGGASSPAERRSKRRRRSGGDGGGGGGARAPEGVRAPAAGQPRATKGAPPPPGTPPPSPMSSAIERKSLDPSEEPVDEVLQIPPSLLTCGGCQQNIGDRYFLKAIDQYWHEDCLSCDLCGCRLGEVGRRLYYKLGRKLCRRDYLRLFGQDGLCASCDKRIRAYEMTMRVKDKVYHLECFKCAACQKHFCVGDRYLLINSDIVCEQDIYEWTKINGMI

SEQ ID NO: 223 - protein, 312 aa, Homo sapiens
MSYQKKQPTPQPPVDCVKTSGGGGGGGGSGGGGCGFFGGGGSGGGSSGSGCGYSGGGGYSGGGCGGGSSGGGGGGGIGGCGGGSGGSVKYSGGGGSSGGGSGCFSSGGGGSGCFSSGGGGSSGGGSGCFSSGGGGSSGGGSGCFSSGGGGFSGQAVQCQSYGGVSSGGSSGGGSGCFSSGGGGGSVCGYSGGGSGCGGGSSGGSGSGYVSSQQVTQTSCAPQPSYGGGSSGGGGSGGSGCFSSGGGGGSSGCGGGSSGIGSGCIISGGGSVCGGGSSGGGGGGSSVGGSGSGKGVPICHQTQQKQAPTWPSK

SEQ ID NO: 224 - protein, 1615 aa, Homo sapiens
MEAAPPGPPWPLLLLLLLLLALCGCPAPAAASPLLLFANRRDVRLVDAGGVKLESTIVVSGLEDAAAVDFQFSKGAVYWTDVSEEAIKQTYLNQTGAAVQNVVISGLVSPDGLACDWVGKKLYWTDSETNRIEVANLNGTSRKVLFWQDLDQPRAIALDPAHGYMYWTDWGETPRIERAGMDGSTRKIIVDSDIYWPNGLTIDLEEQKLYWADAKLSFIHRANLDGSFRQKVVEGSLTHPFALTLSGDTLYWTDWQTRSIHACNKRTGGKRKEILSALYSPMDIQVLSQERQPFFHTRCEEDNGGCSHLCLLSPSEPFYTCACPTGVQLQDNGRTCKAGAEEVLLLARRTDLRRISLDTPDFTDIVLQVDDIRHAIAIDYDPLEGYVYWTDDEVRAIRRAYLDGSGAQTLVNTEINDPDGIAVDWVARNLYWTDTGTDRIEVTRLNGTSRKILVSEDLDEPRAIALHPVMGLMYWTDWGENPKIECANLDGQERRVLVNASLGWPNGLALDLQEGKLYWGDAKTDKIEVINVDGTKRRTLLEDKLPHIFGFTLLGDFIYWTDWQRRSIERVHKVKASRDVIIDQLPDLMGLKAVNVAKVVGTNPCADRNGGCSHLCFFTPHATRCGCPIGLELLSDMKTCIVPEAFLVFTSRAAIHRISLETNNNDVAIPLTGVKEASALDFDVSNNHIYWTDVSLKTISRAFMNGSSVEHVVEFGLDYPEGMAVDWMGKNLYWADTGTNRIEVARLDGQFRQVLVWRDLDNPRSLALDPTKGYIYWTEWGGKPRIVRAFMDGTNCMTLVDKVGRANDLTIDYADQRLYWTDLDTNMIESSNMLGQERVVIADDLPHPFGLTQYSDYIYWTDWNLHSIERADKTSGRNRTLIQGHLDFVMDILVFHSSRQDGLNDCMHNNGQCGQLCLAIPGGHRCGCASHYTLDPSSRNCSPPTTFLLFSQKSAISRMIPDDQHSPDLILPLHGLRNVKAIDYDPLDKFIYWVDGRQNIKRAKDDGTQPFVLTSLSQGQNPDRQPHDLSIDIYSRTLFWTCEATNTINVHRLSGEAMGVVLRGDRDKPRAIVVNAERGYLYFTNMQDRAAKIERAALDGTEREVLFTTGLIRPVALVVDNTLGKLFWVDADLKRIESCDLSGANRLTLEDANIVQPLGLTILGKHLYWIDRQQQMIERVEKTTGDKRTRIQGRVAHLTGIHAVEEVSLEEFSAHPCARDNGGCSHICIAKGDGTPRCSCPVHLVLLQNLLTCGEPPTCSPDQFACATGEIDCIPGAWRCDGFPECDDQSDEEGCPVCSAAQFPCARGQCVDLRLRCDGEADCQDRSDEADCDAICLPNQFRCASGQCVLIKQQCDSFPDCIDGSDELMCEITKPPSDDSPAHSSAIGPVIGIILSLFVMGGVYFVCQRVVCQRYAGANGPFPHEYVSGTPHVPLNFIAPGGSQHGPFTGIACGKSMMSSVSLMGGRGGVPLYDRNHVTGASSSSSSSTKATLYPPILNPPPSPATDPSLYNMDMFYSSNIPATARPYRPYIIRGMAPPTTPCSTDVCDSDYSASRWKASKYYLDLNSDSDPYPPPPTPHSQYLSAEDSCPPSPATERSYFHLFPPPPSPCTDSS

SEQ ID NO: 225 - protein, 1613 aa, Homo sapiens
MGAVLRSLLACSFCVLLRAAPLLLYANRRDLRLVDATNGKENATIVVGGLEDAAAVDFVFSHGLIYWSDVSEEAIKRTEFNKTESVQNVVVSGLLSPDGLACDWLGEKLYWTDSETNRIEVSNLDGSLRKVLFWQELDQPRAIALDPSSGFMYWTDWGEVPKIERAGMDGSSRFIIINSEIYWPNGLTLDYEEQKLYWADAKLNFIHKSNLDGTNRQAVVKGSLPHPFALTLFEDILYWTDWSTHSILACNKYTGEGLREIHSDIFSPMDIHAFSQQRQPNATNPCGIDNGGCSHLCLMSPVKPFYQCACPTGVKLLENGKTCKDGATELLLLARRTDLRRISLDTPDFTDIVLQLEDIRHAIAIDYDPVEGYIYWTDDEVRAIRRSFIDGSGSQFVVTAQIAHPDGIAVDWVARNLYWTDTGTDRIEVTRLNGTMRKILISEDLEEPRAIVLDPMVGYMYWTDWGEIPKIERAALDGSDRVVLVNTSLGWPNGLALDYDEGKIYWGDAKTDKIEVMNTDGTGRRVLVEDKIPHIFGFTLLGDYVYWTDWQRRSIERVHKRSAEREVIIDQLPDLMGLKATNVHRVIGSNPCAEENGGCSHLCLYRPQGLRCACPIGFELISDMKTCIVPEAFLLFSRRADIRRISLETNNNNVAIPLTGVKEASALDFDVTDNRIYWTDISLKTISRAFMNGSALEHVVEFGLDYPEGMAVDWLGKNLYWADTGTNRIEVSKLDGQHRQVLVWKDLDSPRALALDPAEGFMYWTEWGGKPKIDRAAMDGSERTTLVPNVGRANGLTIDYAKRRLYWTDLDTNLIESSNMLGLNREVIADDLPHPFGLTQYQDYIYWTDWSRRSIERANKTSGQNRTIIQGHLDYVMDILVFHSSRQSGWNECASSNGHCSHLCLAVPVGGFVCGCPAHYSLNADNRTCSAPTTFLLFSQKSAINRMVIDEQQSPDIILPIHSLRNVRAIDYDPLDKQLYWIDSRQNMIRKAQEDGSQGFTVVVSSVPSQNLEIQPYDLSIDIYSRYIYWTCEATNVINVTRLDGRSVGVVLKGEQDRPRAVVVNPEKGYMYFTNLQERSPKIERAALDGTEREVLFFSGLSKPIALALDSRLGKLFWADSDLRRIESSDLSGANRIVLEDSNILQPVGLTVFENWLYWIDKQQQMIEKIDMTGREGRTKVQARIAQLSDIHAVKELNLQEYRQHPCAQDNGGCSHICLVKGDGTTRCSCPMHLVLLQDELSCGEPPTCSPQQFTCFTGEIDCIPVAWRCDGFTECEDHSDELNCPVCSESQFQCASGQCIDGALRCNGDANCQDKSDEKNCEVLCLIDQFRCANGQCIGKHKKCDHNVDCSDKSDELDCYPTEEPAPQATNTVGSVIGVIVTIFVSGTVYFICQRMLCPRMKGDGETMTNDYVVHGPASVPLGYVPHPSSLSGSLPGMSRGKSMISSLSIMGGSSGPPYDRAHVTGASSSSSSSTKGTYFPAILNPPPSPATERSHYTMEFGYSSNSPSTHRSYSYRPYSYRHFAPPTTPCSTDVCDSDYAPSRRMTSVATAKGYTSDLNYDSEPVPPPPTPRSQYLSAEENYESCPPSPYTERSYSHHLYPPPPSPCTDSS

SEQ ID NO: 226 - protein, 399 aa, Homo sapiens
MPQLSGGGGGGGGDPELCATDEMIPFKDEGDPQKEKIFAEISHPEEEGDLADIKSSLVNESEIIPASNGHEVARQAQTSQEPYHDKAREHPDDGKHPDGGLYNKGPSYSSYSGYIMMPNMNNDPYMSNGSLSPPIPRTSNKVPVVQPSHAVHPLTPLITYSDEHFSPGSHPSHIPSDVNSKQGMSRHPPAPDIPTFYPLSPGGVGQITPPLGWQGQPVYPITGGFRQPYPSSLSVDTSMSRFSHHMIPGPPGPHTTGIPHPAIVTPQVKQEHPHTDSDLMHVKPQHEQRKEQEPKRPHIKKPLNAFMLYMKEMRANVVAECTLKESAAINQILGRRWHALSREEQAKYYELARKERQLHMQLYPGWSARDNYGKKKKRKREKLQESASGTGPRMTAAYI

SEQ ID NO: 227 - protein, 1016 aa, Homo sapiens
MVLPTCPMAEFALPRHSAVMERLRRRIELCRRHHSTCEARYEAVSPERLELERQHTFALHQRCIQAKAKRAGKHRQPPAATAPAPAAPAPRLDAADGPEHGRPATHLHDTVKRNLDSATSPQNGDQQNGYGDLFPGHKKTRREAPLGVAISSNGLPPASPLGQSDKPSGADALQSSGKHSLGLDSLNKKRLADSSLHLNGGSNPSESFPLSLNKELKQEPVEDLPCMITGTVGSISQSNLMPDLNLNEQEWKELIEELNRSVPDEDMKDLFNEDFEEKKDPESSGSATQTPLAQDINIKTEFSPAAFEQEQLGSPQVRAGSAGQTFLGPSSAPVSTDSPSLGGSQTLFHTSGQPRADNPSPNLMPASAQAQNAQRALAGVVLPSQGPGGASELSSAHQLQQIAAKQKREQMLQNPQQATPAPAPGQMSTWQQTGPSHSSLDVPYPMEKPASPSSYKQDFTNSKLLMMPSVNKSSPRPGGPYLQPSHVNLLSHQPPSNLNQNSANNQGSVLDYGNTKPLSHYKADCGQGSPGSGQSKPALMAYLPQQLSHISHEQNSLFLMKPKPGNMPFRSLVPPGQEQNPSSVPVQAQATSVGTQPPAVSVASSHNSSPYLSSQQQAAVMKQHQLLLDQQKQREQQQKHLQQQQFLQRQQHLLAEQEKQQFQRHLTRPPPQYQDPTQGSFPQQVGQFTGSSAAVPGMNTLGPSNSSCPRVFPQAGNLMPMGPGHASVSSLPTNSGQQDRGVAQFPGSQNMPQSSLYGMASGITQIVAQPPPQATNGHAHIPRQTNVGQNTSVSAAYGQNSLGSSGLSQQHNKGTLNPGLTKPPVPRVSPAMGGQNSSWQHQGMPNLSGQTPGNSNVSPFTAASSFHMQQQAHLKMSSPQFSQAVPNRPMAPMSSAAAVGSLLPPVSAQQRTSAPAPAPPPTAPQQGLPGLSPAGPELGAFSQSPASQMGGRAGLHCTQAYPVRTAGQELPFAYSGQPGGSGLSSVAGHTDLIDSLLKNRTSEEWMSDLDDLLGSQ

SEQ ID NO: 228 - protein, 1156 aa, Homo sapiens
MGDTAPPQAPAGGLGGASGAGLLGGGSVTPRVHSAIVERLRARIAVCRQHHLSCEGRYERGRAESSDRERESTLQLLSLVQHGQGARKAGKHTKATATAATTTAPPPPPAAPPAASQAAATAAPPPPPDYHHHHQQHLLNSSNNGGSGGINGEQQPPASTPGDQRNSALIALQGSLKRKQVVNLSPANSKRPNGFVDNSFLDIKRIRVGENLSAGQGGLQINNGQSQIMSGTLPMSQAPLRKTNTLPSHTHSPGNGLFNMGLKEVKKEPGETLSCSKHMDGQMTQENIFPNRYGDDPGEQLMDPELQELFNELTNISVPPMSDLELENMINATIKQDDPFNIDLGQQSQRSTPRPSLPMEKIVIKSEYSPGLTQGPSGSPQLRPPSAGPAFSMANSALSTSSPIPSVPQSQAQPQTGSGASRALPSWQEVSHAQQLKQIAANRQQHARMQQHQQQHQPTNWSALPSSAGPSPGPFGQEKIPSPSFGQQTFSPQSSPMPGVAGGSGQSKVMANYMYKAGPSAQGGHLDVLMQQKPQDLSRSFINNPHPAMEPRQGNTKPLFHFNSDQANQQMPSVLPSQNKPSLLHYTQQQQQQQQQQQQQQQQQQQQQQQQQQQQQQQQQQSSISAQQQQQQQSSISAQQQQQQQQQQQQQQQQQQQQQQQQQQQPSSQPAQSLPSQPLLRSPLPLQQKLLLQQMQNQPIAGMGYQVSQQQRQDQHSVVGQNTGPSPSPNPCSNPNTGSGYMNSQQSLLNQQLMGKKQTLQRQIMEQKQQLLLQQQMLADAEKIAPQDQINRHLSRPPPDYKDQRRNVGNMQPTAQYSGGSSTISLNSNQALANPVSTHTILTPNSSLLSTSHGTRMPSLSTAVQNMGMYGNLPCNQPNTYSVTSGMNQLTQQRNPKQLLANQNNPMMPRPPTLGPSNNNNVATFGAGSVGNSQQLRPNLTHSMASMPPQRTSNVMITSNTTAPNWASQEGTSKQQEALTSAGVRFPTGTPAAYTPNQSLQQAVGSQQFSQRAVAPPNQLTPAVQMRPMNQMSQTLNGQTMGPLRGLNLRPNQLSTQILPNLNQSGTGLNQSRTGINQPPSLTPSNFPSPNQSSRAFQGTDHSSDLAFDFLSQQNDNMGPALNSDADFIDSLLKTEPGNDDWMKDINLDEILGNNS

SEQ ID NO: 229 - protein, 267 aa, Homo sapiens
MRLTVLCAVCLLPGSLALPLPQEAGGMSELQWEQAQDYLKRFYLYDSETKNANSLEAKLKEMQKFFGLPITGMLNSRVIEIMQKPRCGVPDVAEYSLFPNSPKWTSKVVTYRIVSYTRDLPHITVDRLVSKALNMWGKEIPLHFRKVVWGTADIMIGFARGAHGDSYPFDGPGNTLAHAFAPGTGLGGDAHFDEDERWTDGSSLGINFLYAATHELGHSLGMGHSSDPNAVMYPTYGNGDPQNFKLSQDDIKGIQKLYGKRSNSRKK

SEQ ID NO: 230 - protein, 321 aa, Homo sapiens
MQCRLPRGLAGALLTLLCMGLLCLRYHLNLSPQRVQGTPELSQPNPGPPKLQLHDVFIAVKTTRAFHRLRLELLLDTWVSRTREQTFVFTDSPDKGLQERLGSHLVVTNCSAEHSHPALSCKMAAEFDTFLASGLRWFCHVDDDNYVNPRALLQLLRAFPLARDVYVGRPSLNRPIHASEPQPHNRTRLVQFWFATGGAGFCINRKLALKMAPWASGSRFMDTSALIRLPDDCTMGYIIECKLGGRLQPSPLFHSHLETLQLLRTAQLPEQVTLSYGVFEGKLNVIKLQGPFSPEEDPSRFRSLHCLLYPDTPWCPQLGAR

SEQ ID NO: 231 - protein, 427 aa, Homo sapiens
MSRSKRDNNFYSVEIGDSTFTVLKRYQNLKPIGSGAQGIVCAAYDAILERNVAIKKLSRPFQNQTHAKRAYRELVLMKCVNHKNIIGLLNVFTPQKSLEEFQDVYIVMELMDANLCQVIQMELDHERMSYLLYQMLCGIKHLHSAGIIHRDLKPSNIVVKSDCTLKILDFGLARTAGTSFMMTPYVVTRYYRAPEVILGMGYKENVDLWSVGCIMGEMVCHKILFPGRDYIDQWNKVIEQLGTPCPEFMKKLQPTVRTYVENRPKYAGYSFEKLFPDVLFPADSEHNKLKASQARDLLSKMLVIDASKRISVDEALQHPYINVWYDPSEAEAPPPKIPDKQLDEREHTIEEWKELIYKEVMDLEERTKNGVIRGQPSPLGAAVINGSQHPSSSSSVNDVSSMSTDPTLASDTDSSLEAAAGPLGCCR

SEQ ID NO: 232 - protein, 470 aa, Homo sapiens
MGKLHSKPAAVCKRRESPEGDSFAVSAAWARKGIEEWIGRQRCPGGVSGPRQLRLAGTIGRSTRELVGDVLRDTLSEEEEDDFRLEVALPPEKTDGLGSGDEKKMERVSEPCPGSKKQLKFEELQCDVSMEEDSRQEWTFTLYDFDNNGKVTREDITSLLHTIYEVVDSSVNHSPTSSKMLRVKLTVAPDGSQSKRSVLVNQADLQSARPRAETKPTEDLRSWEKKQRAPLRFQGDSRLEQSGCYHHCVDENIERRNHYLDLAGIENYTSQFGPGSPSVAQKSELPPRTSNPTRSRSHEPEAIHIPHRKPQGVDPASFHFLDTPIAKVSELQQRLRGTQDGSKHFVRSPKAQGKSVGVGHVARGARNKPPLGPAIPAVSPSAHLAASPALLPSLAPLGHKKHKHRAKESQQGCRGLQAPLASGGPVLGREHLRELPALVVYESQAGQPVQRHEHHHHHEHHHHYHHFYQT

SEQ ID NO: 233 - protein, 527 aa, Homo sapiens
MSLCGARANAKMMAAYNGGTSAAAAGHHHHHHHHLPHLPPPHLHHHHHPQHHLHPGSAAAVHPVQQHTSSAAAAAAAAAAAAAMLNPGQQQPYFPSPAPGQAPGPAAAAPAQVQAAAAATVKAHHHQHSHHPQQQLDIEPDRPIGYGAFGVVWSVTDPRDGKRVALKKMPNVFQNLVSCKRVFRELKMLCFFKHDNVLSALDILQPPHIDYFEEIYVVTELMQSDLHKIIVSPQPLSSDHVKVFLYQILRGLKYLHSAGILHRDIKPGNLLVNSNCVLKICDFGLARVEELDESRHMTQEVVTQYYRAPEILMGSRHYSNAIDIWSVGCIFAELLGRRILFQAQSPIQQLDLITDLLGTPSLEAMRTACEGAKAHILRGPHKQPSLPVLYTLSSQATHEAVHLLCRMLVFDPSKRISAKDALAHPYLDEGRLRYHTCMCKCCFSTSTGRVYTSDFEPVTNPKFDDTFEKNLSSVRQVKEIIHQFILEQQKGNRVPLCINPQSAAFKSFISSTVAQPSEMPPSPLVWE

SEQ ID NO: 234 - protein, 574 aa, Homo sapiens
MGNNFSSIPSLPRGNPSRAPRGHPQNLKDSIGGPFPVTSHRCHHKQKHCPAVLPSGGLPATPLLFHPHTKGSQILMDLSHKAVKRQASFCNAITFSNRPVLIYEQVRLKITKKQCCWSGALRLGFTSKDPSRIHPDSLPKYACPDLVSQSGFWAKALPEEFANEGNIIAFWVDKKGRVFHRINDSAVMLFFSGVRTADPLWALVDVYGLTRGVQLLDSELVLPDCLRPRSFTALRRPSLRREADDARLSVSLCDLNVPGADGDEAAPAAGCPIPQNSLNSQHSRALPAQLDGDLRFHALRAGAHVRILDEQTVARVEHGRDERALVFTSRPVRVAETIFVKVTRSGGARPGALSFGVTTCDPGTLRPADLPFSPEALVDRKEFWAVCRVPGPLHSGDILGLVVNADGELHLSHNGAAAGMQLCVDASQPLWMLFGLHGTITQIRILGSTILAERGIPSLPCSPASTPTSPSALGSRLSDPLLSTCSSGPLGSSAGGTAPNSPVSLPESPVTPGLGQWSDECTICYEHAVDTVIYTCGHMCLCYACGLRLKKALHACCPICRRPIKDIIKTYRSS

SEQ ID NO: 235 - protein, 709 aa, Homo sapiens
MATAGGGSGADPGSRGLLRLLSFCVLLAGLCRGNSVERKIYIPLNKTAPCVRLLNATHQIGCQSSISGDTGVIHVVEKEEDLQWVLTDGPNPPYMVLLESKHFTRDLMEKLKGRTSRIAGLAVSLTKPSPASGFSPSVQCPNDGFGVYSNSYGPEFAHCREIQWNSLGNGLAYEDFSFPIFLLEDENETKVIKQCYQDHNLSQNGSAPTFPLCAMQLFSHMHAVISTATCMRRSSIQSTFSINPEIVCDPLSDYNVWSMLKPINTTGTLKPDDRVVVAATRLDSRSFFWNVAPGAESAVASFVTQLAAAEALQKAPDVTTLPRNVMFVFFQGETFDYIGSSRMVYDMEKGKFPVQLENVDSFVELGQVALRTSLELWMHTDPVSQKNESVRNQVEDLLATLEKSGAGVPAVILRRPNQSQPLPPSSLQRFLRARNISGVVLADHSGAFHNKYYQSIYDTAENINVSYPEWLSPEEDLNFVTDTAKALADVATVLGRALYELAGGTNFSDTVQADPQTVTRLLYGFLIKANNSWFQSILRQDLRSYLGDGPLQHYIAVSSPTNTTYVVQYALANLTGTVVNLTREQCQDPSKVPSENKDLYEYSWVQGPLHSNETDRLPRCVRSTARLARALSPAFELSQWSSTEYSTWTESRWKDIRARIFLIASKELELITLTVGFGILIFSLIVTYCINAKADVLFIAPREPGAVSY

SEQ ID NO: 236 - protein, 2555 aa, Homo sapiens
MPPLLAPLLCLALLPALAARGPRCSQPGETCLNGGKCEAANGTEACVCGGAFVGPRCQDPNPCLSTPCKNAGTCHVVDRRGVADYACSCALGFSGPLCLTPLDNACLTNPCRNGGTCDLLTLTEYKCRCPPGWSGKSCQQADPCASNPCANGGQCLPFEASYICHCPPSFHGPTCRQDVNECGQKPGLCRHGGTCHNEVGSYRCVCRATHTGPNCERPYVPCSPSPCQNGGTCRPTGDVTHECACLPGFTGQNCEENIDDCPGNNCKNGGACVDGVNTYNCRCPPEWTGQYCTEDVDECQLMPNACQNGGTCHNTHGGYNCVCVNGWTGEDCSENIDDCASAACFHGATCHDRVASFYCECPHGRTGLLCHLNDACISNPCNEGSNCDTNPVNGKAICTCPSGYTGPACSQDVDECSLGANPCEHAGKCINTLGSFECQCLQGYTGPRCEIDVNECVSNPCQNDATCLDQIGEFQCICMPGYEGVHCEVNTDECASSPCLHNGRCLDKINEFQCECPTGFTGHLCQYDVDECASTPCKNGAKCLDGPNTYTCVCTEGYTGTHCEVDIDECDPDPCHYGSCKDGVATFTCLCRPGYTGHHCETNINECSSQPCRHGGTCQDRDNAYLCFCLKGTTGPNCEINLDDCASSPCDSGTCLDKIDGYECACEPGYTGSMCNINIDECAGNPCHNGGTCEDGINGFTCRCPEGYHDPTCLSEVNECNSNPCVHGACRDSLNGYKCDCDPGWSGTNCDINNNECESNPCVNGGTCKDMTSGYVCTCREGFSGPNCQTNINECASNPCLNQGTCIDDVAGYKCNCLLPYTGATCEVVLAPCAPSPCRNGGECRQSEDYESFSCVCPTGWQGQTCEVDINECVLSPCRHGASCQNTHGGYRCHCQAGYSGRNCETDIDDCRPNPCHNGGSCTDGINTAFCDCLPGFRGTFCEEDINECASDPCRNGANCTDCVDSYTCTCPAGFSGIHCENNTPDCTESSCFNGGTCVDGINSFTCLCPPGFTGSYCQHDVNECDSQPCLHGGTCQDGCGSYRCTCPQGYTGPNCQNLVHWCDSSPCKNGGKCWQTHTQYRCECPSGWTGLYCDVPSVSCEVAAQRQGVDVARLCQHGGLCVDAGNTHHCRCQAGYTGSYCEDLVDECSPSPCQNGATCTDYLGGYSCKCVAGYHGVNCSEEIDECLSHPCQNGGTCLDLPNTYKCSCPRGTQGVHCEINVDDCNPPVDPVSRSPKCFNNGTCVDQVGGYSCTCPPGFVGERCEGDVNECLSNPCDARGTQNCVQRVNDFHCECRAGHTGRRCESVINGCKGKPCKNGGTCAVASNTARGFICKCPAGFEGATCENDARTCGSLRCLNGGTCISGPRSPTCLCLGPFTGPECQFPASSPCLGGNPCYNQGTCEPTSESPFYRCLCPAKFNGLLCHILDYSFGGGAGRDIPPPLIEEACELPECQEDAGNKVCSLQCNNHACGWDGGDCSLNFNDPWKNCTQSLQCWKYFSDGHCDSQCNSAGCLFDGFDCQRAEGQCNPLYDQYCKDHFSDGHCDQGCNSAECEWDGLDCAEHVPERLAAGTLVVVVLMPPEQLRNSSFHFLRELSRVLHTNVVFKRDAHGQQMIFPYYGREEELRKHPIKRAAEGWAAPDALLGQVKASLLPGGSEGGRRRRELDPMDVRGSIVYLEIDNRQCVQASSQCFQSATDVAAFLGALASLGSLNIPYKIEAVQSETVEPPPPAQLHFMYVAAAAFVLLFFVGCGVLLSRKRRRQHGQLWFPEGFKVSEASKKKRREPLGEDSVGLKPLKNASDGALMDDNQNEWGDEDLETKKFRFEEPVVLPDLDDQTDHRQWTQQHLDAADLRMSAMAPTPPQGEVDADCMDVNVRGPDGFTPLMIASCSGGGLETGNSEEEEDAPAVISDFIYQGASLHNQTDRTGETALHLAARYSRSDAAKRLLEASADANIQDNMGRTPLHAAVSADAQGVFQILIRNRATDLDARMHDGTTPLILAARLAVEGMLEDLINSHADVNAVDDLGKSALHWAAAVNNVDAAVVLLKNGANKDMQNNREETPLFLAAREGSYETAKVLLDHFANRDITDHMDRLPRDIAQERMHHDIVRLLDEYNLVRSPQLHGAPLGGTPTLSPPLCSPNGYLGSLKPGVQGKKVRKPSSKGLACGSKEAKDLKARRKKSQDGKGCLLDSSGMLSPVDSLESPHGYLSDVASPPLLPSPFQQSPSVPLNHLPGMPDTHLGIGHLNVAAKPEMAALGGGGRLAFETGPPRLSHLPVASGTSTVLGSSSGGALNFTVGGSTSLNGQCEWLSRLQSGMVPNQYNPLRGSVAPGPLSTQAPSLQHGMVGPLHSSLAASALSQMMSYQGLPSTRLATQPHLVQTQQVQPQNLQMQQQNLQPANIQQQQSLQPPPPPPQPHLGVSSAASGHLGRSFLSGEPSQADVQPLGPSSLAVHTILPQESPALPTSLPSSLVPPVTAAQFLTPPSQHSYSSPVDNTPSHQLQVPEHPFLTPSPESPDQWSSSSPHSNVSDWSEGVSSPPTSMQSQIARIPEAFK

SEQ ID NO: 237 - protein, 2471 aa, Homo sapiens
MPALRPALLWALLALWLCCAAPAHALQCRDGYEPCVNEGMCVTYHNGTGYCKCPEGFLGEYCQHRDPCEKNRCQNGGTCVAQAMLGKATCRCASGFTGEDCQYSTSHPCFVSRPCLNGGTCHMLSRDTYECTCQVGFTGKECQWTDACLSHPCANGSTCTTVANQFSCKCLTGFTGQKCETDVNECDIPGHCQHGGTCLNLPGSYQCQCPQGFTGQYCDSLYVPCAPSPCVNGGTCRQTGDFTFECNCLPGFEGSTCERNIDDCPNHRCQNGGVCVDGVNTYNCRCPPQWTGQFCTEDVDECLLQPNACQNGGTCANRNGGYGCVCVNGWSGDDCSENIDDCAFASCTPGSTCIDRVASFSCMCPEGKAGLLCHLDDACISNPCHKGALCDTNPLNGQYICTCPQGYKGADCTEDVDECAMANSNPCEHAGKCVNTDGAFHCECLKGYAGPRCEMDINECHSDPCQNDATCLDKIGGFTCLCMPGFKGVHCELEINECQSNPCVNNGQCVDKVNRFQCLCPPGFTGPVCQIDIDDCSSTPCLNGAKCIDHPNGYECQCATGFTGVLCEENIDNCDPDPCHHGQCQDGIDSYTCICNPGYMGAICSDQIDECYSSPCLNDGRCIDLVNGYQCNCQPGTSGVNCEINFDDCASNPCIHGICMDGINRYSCVCSPGFTGQRCNIDIDECASNPCRKGATCINGVNGFRCICPEGPHHPSCYSQVNECLSNPCIHGNCTGGLSGYKCLCDAGWVGINCEVDKNECLSNPCQNGGTCDNLVNGYRCTCKKGFKGYNCQVNIDECASNPCLNQGTCFDDISGYTCHCVLPYTGKNCQTVLAPCSPNPCENAAVCKESPNFESYTCLCAPGWQGQRCTIDIDECISKPCMNHGLCHNTQGSYMCECPPGFSGMDCEEDIDDCLANPCQNGGSCMDGVNTFSCLCLPGFTGDKCQTDMNECLSEPCKNGGTCSDYVNSYTCKCQAGFDGVHCENNINECTESSCFNGGTCVDGINSFSCLCPVGFTGSFCLHEINECSSHPCLNEGTCVDGLGTYRCSCPLGYTGKNCQTLVNLCSRSPCKNKGTCVQKKAESQCLCPSGWAGAYCDVPNVSCDIAASRRGVLVEHLCQHSGVCINAGNTHYCQCPLGYTGSYCEEQLDECASNPCQHGATCSDFIGGYRCECVPGYQGVNCEYEVDECQNQPCQNGGTCIDLVNHFKCSCPPGTRGLLCEENIDDCARGPHCLNGGQCMDRIGGYSCRCLPGFAGERCEGDINECLSNPCSSEGSLDCIQLTNDYLCVCRSAFTGRHCETFVDVCPQMPCLNGGTCAVASNMPDGFICRCPPGFSGARCQSSCGQVKCRKGEQCVHTASGPRCFCPSPRDCESGCASSPCQHGGSCHPQRQPPYYSCQCAPPFSGSRCELYTAPPSTPPATCLSQYCADKARDGVCDEACNSHACQWDGGDCSLTMENPWANCSSPLPCWDYINNQCDELCNTVECLFDNFECQGNSKTCKYDKYCADHFKDNHCDQGCNSEECGWDGLDCAADQPENLAEGTLVIVVLMPPEQLLQDARSFLRALGTLLHTNLRIKRDSQGELMVYPYYGEKSAAMKKQRMTRRSLPGEQEQEVAGSKVFLEIDNRQCVQDSDHCFKNTDAAAALLASHAIQGTLSYPLVSVVSESLTPERTQLLYLLAVAVVIILFIILLGVIMAKRKRKHGSLWLPEGFTLRRDASNHKRREPVGQDAVGLKNLSVQVSEANLIGTGTSEHWVDDEGPQPKKVKAEDEALLSEEDDPIDRRPWTQQHLEAADIRRTPSLALTPPQAEQEVDVLDVNVRGPDGCTPLMLASLRGGSSDLSDEDEDAEDSSANIITDLVYQGASLQAQTDRTGEMALHLAARYSRADAAKRLLDAGADANAQDNMGRCPLHAAVAADAQGVFQILIRNRVTDLDARMNDGTTPLILAARLAVEGMVAELINCQADVNAVDDHGKSALHWAAAVNNVEATLLLLKNGANRDMQDNKEETPLFLAAREGSYEAAKILLDHFANRDITDHMDRLPRDVARDRMHHDIVRLLDEYNVTPSPPGTVLTSALSPVICGPNRSFLSLKHTPMGKKSRRPSAKSTMPTSLPNLAKEAKDAKGSRRKKSLSEKVQLSESSVTLSPVDSLESPHTYVSDTTSSPMITSPGILQASPNPMLATAAPPAPVHAQHALSFSNLHEMQPLAHGASTVLPSVSQLLSHHHIVSPGSGSAGSLSRLHPVPVPADWMNRMEVNETQYNEMFGMVLAPAEGTHPGIAPQSRPPEGKHITTPREPLPPIVTFQLIPKGSIAQPAGAPQPQSTCPPAVAGPLPTMYQIPEMARLPSVAFPTAMMPQQDGQVAQTILPAYHPFPASVGKYPTPPSQHSYASSNAAERTPSHSGHLQGEHPYLTPSPESPDQWSSSSPHSASDWSDVTTSPTPGGAGGGQRGPGTHMSEPPHNNMQVYA

SEQ ID NO: 238 - protein, 236 aa, Homo sapiens
MCVTYHNGTGYCKCPEGFLGEYCQHRDPCEKNRCQNGGTCVAQAMLGKATCRCASGFTGEDCQYSTSHPCFVSRPCLNGGTCHMLSRDTYECTCQVGFTGKECQWTDACLSHPCANGSTCTTVANQFSCKCLTGFTGQKCETDVNECDIPGHCQHGGTCLNLPGSYQCQCLQGFTGQYCDSLYVPCAPSPCVNGGTCRQTGDFTFECNCLPETVRRGTELWERDREVWNGKEHDEN

SEQ ID NO: 239 - protein, 2321 aa, Homo sapiens
MGPGARGRRRRRRPMSPPPPPPPVRALPLLLLLAGPGAAAPPCLDGSPCANGGRCTQLPSREAACLCPPGWVGERCQLEDPCHSGPCAGRGVCQSSVVAGTARFSCRCPRGFRGPDCSLPDPCLSSPCAHGARCSVGPDGRFLCSCPPGYQGRSCRSDVDECRVGEPCRHGGTCLNTPGSFRCQCPAGYTGPLCENPAVPCAPSPCRNGGTCRQSGDLTYDCACLPGFEGQNCEVNVDDCPGHRCLNGGTCVDGVNTYNCQCPPEWTGQFCTEDVDECQLQPNACHNGGTCFNTLGGHSCVCVNGWTGESCSQNIDDCATAVCFHGATCHDRVASFYCACPMGKTGLLCHLDDACVSNPCHEDAICDTNPVNGRAICTCPPGFTGGACDQDVDECSIGANPCEHLGRCVNTQGSFLCQCGRGYTGPRCETDVNECLSGPCRNQATCLDRIGQFTCICMAGFTGTYCEVDIDECQSSPCVNGGVCKDRVNGFSCTCPSGFSGSTCQLDVDECASTPCRNGAKCVDQPDGYECRCAEGFEGTLCDRNVDDCSPDPCHHGRCVDGIASFSCACAPGYTGTRCESQVDECRSQPCRHGGKCLDLVDKYLCRCPSGTTGVNCEVNIDDCASNPCTFGVCRDGINRYDCVCQPGFTGPLCNVEINECASSPCGEGGSCVDGENGFRCLCPPGSLPPLCLPPSHPCAHEPCSHGICYDAPGGFRCVCEPGWSGPRCSQSLARDACESQPCRAGGTCSSDGMGFHCTCPPGVQGRQCELLSPCTPNPCEHGGRCESAPGQLPVCSCPQGWQGPRCQQDVDECAGPAPCGPHGICTNLAGSFSCTCHGGYTGPSCDQDINDCDPNPCLNGGSCQDGVGSFSCSCLPGFAGPRCARDVDECLSNPCGPGTCTDHVASFTCTCPPGYGGFHCEQDLPDCSPSSCFNGGTCVDGVNSFSCLCRPGYTGAHCQHEADPCLSRPCLHGGVCSAAHPGFRCTCLESFTGPQCQTLVDWCSRQPCQNGGRCVQTGAYCLCPPGWSGRLCDIRSLPCREAAAQIGVRLEQLCQAGGQCVDEDSSHYCVCPEGRTGSHCEQEVDPCLAQPCQHGGTCRGYMGGYMCECLPGYNGDNCEDDVDECASQPCQHGGSCIDLVARYLCSCPPGTLGVLCEINEDDCGPGPPLDSGPRCLHNGTCVDLVGGFRCTCPPGYTGLRCEADINECRSGACHAAHTRDCLQDPGGGFRCLCHAGFSGPRCQTVLSPCESQPCQHGGQCRPSPGPGGGLTFTCHCAQPFWGPRCERVARSCRELQCPVGVPCQQTPRGPRCACPPGLSGPSCRSFPGSPPGASNASCAAAPCLHGGSCRPAPLAPFFRCACAQGWTGPRCEAPAAAPEVSEEPRCPRAACQAKRGDQRCDRECNSPGCGWDGGDCSLSVGDPWRQCEALQCWRLFNNSRCDPACSSPACLYDNFDCHAGGRERTCNPVYEKYCADHFADGRCDQGCNTEECGWDGLDCASEVPALLARGVLVLTVLLPPEELLRSSADFLQRLSAILRTSLRFRLDAHGQAMVFPYHRPSPGSEPRARRELAPEVIGSVVMLEIDNRLCLQSPENDHCFPDAQSAADYLGALSAVERLDFPYPLRDVRGEPLEPPEPSVPLLPLLVAGAVLLLVILVLGVMVARRKREHSTLWFPEGFSLHKDVASGHKGRREPVGQDALGMKNMAKGESLMGEVATDWMDTECPEAKRLKVEEPGMGAEEAVDCRQWTQHHLVAADIRVAPAMALTPPQGDADADGMDVNVRGPDGFTPLMLASFCGGALEPMPTEEDEADDTSASIISDLICQGAQLGARTDRTGETALHLAARYARADAAKRLLDAGADTNAQDHSGRTPLHTAVTADAQGVFQILIRNRSTDLDARMADGSTALILAARLAVEGMVEELIASHADVNAVDELGKSALHWAAAVNNVEATLALLKNGANKDMQDSKEETPLFLAAREGSYEAAKLLLDHFANREITDHLDRLPRDVAQERLHQDIVRLLDQPSGPRSPPGPHGLGPLLCPPGAFLPGLKAAQSGSKKSRRPPGKAGLGPQGPRGRGKKLTLACPGPLADSSVTLSPVDSLDSPRPFGGPPASPGGFPLEGPYAAATATAVSLAQLGGPGRAGLGRQPPGGCVLSLGLLNPVAVPLDWARLPPPAPPGPSFLLPLAPGPQLLNPGTPVSPQERPPPYLAVPGHGEEYPAAGAHSSPPKARFLRVPSEHPYLTPSPESPEHWASPSPPSLSDWSESTPSPATATGAMATTTGALPAQPLPLSVPSSLAQAQTQLGPQPEVTPKRQVLA

SEQ ID NO: 240 - protein, 2003 aa, Homo sapiens
MQPPSLLLLLLLLLLLCVSVVRPRGLLCGSFPEPCANGGTCLSLSLGQGTCQCAPGFLGETCQFPDPCQNAQLCQNGGSCQALLPAPLGLPSSPSPLTPSFLCTCLPGFTGERCQAKLEDPCPPSFCSKRGRCHIQASGRPQCSCMPGWTGEQCQLRDFCSANPCVNGGVCLATYPQIQCHCPPGFEGHACERDVNECFQDPGPCPKGTSCHNTLGSFQCLCPVGQEGPRCELRAGPCPPRGCSNGGTCQLMPEKDSTFHLCLCPPGFIGPDCEVNPDNCVSHQCQNGGTCQDGLDTYTCLCPETWTGWDCSEDVDECETQGPPHCRNGGTCQNSAGSFHCVCVSGWGGTSCEENLDDCIAATCAPGSTCIDRVGSFSCLCPPGRTGLLCHLEDMCLSQPCHGDAQCSTNPLTGSTLCLCQPGYSGPTCHQDLDECLMAQQGPSPCEHGGSCLNTPGSFNCLCPPGYTGSRCEADHNECLSQPCHPGSTCLDLLATFHCLCPPGLEGQLCEVETNECASAPCLNHADCHDLLNGFQCICLPGFSGTRCEEDIDECRSSPCANGGQCQDQPGAFHCKCLPGFEGPRCQTEVDECLSDPCPVGASCLDLPGAFFCLCPSGFTGQLCEVPLCAPNLCQPKQICKDQKDKANCLCPDGSPGCAPPEDNCTCHHGHCQRSSCVCDVGWTGPECEAELGGCISAPCAHGGTCYPQPSGYNCTCPTGYTGPTCSEEMTACHSGPCLNGGSCNPSPGGYYCTCPPSHTGPQCQTSTDYCVSAPCFNGGTCVNRPGTFSCLCAMGFQGPRCEGKLRPSCADSPCRNRATCQDSPQGPRCLCPTGYTGGSCQTLMDLCAQKPCPRNSHCLQTGPSFHCLCLQGWTGPLCNLPLSSCQKAALSQGIDVSSLCHNGGLCVDSGPSYFCHCPPGFQGSLCQDHVNPCESRPCQNGATCMAQPSGYLCQCAPGYDGQNCSKELDACQSQPCHNHGTCTPKPGGFHCACPPGFVGLRCEGDVDECLDQPCHPTGTAACHSLANAFYCQCLPGHTGQWCEVEIDPCHSQPCFHGGTCEATAGSPLGFICHCPKGFEGPTCSHRAPSCGFHHCHHGGLCLPSPKPGFPPRCACLSGYGGPDCLTPPAPKGCGPPSPCLYNGSCSETTGLGGPGFRCSCPHSSPGPRCQKPGAKGCEGRSGDGACDAGCSGPGGNWDGGDCSLGVPDPWKGCPSHSRCWLLFRDGQCHPQCDSEECLFDGYDCETPPACTPAYDQYCHDHFHNGHCEKGCNTAECGWDGGDCRPEDGDPEWGPSLALLVVLSPPALDQQLFALARVLSLTLRVGLWVRKDRDGRDMVYPYPGARAEEKLGGTRDPTYQERAAPQTQPLGKETDSLSAGFVVVMGVDLSRCGPDHPASRCPWDPGLLLRFLAAMAAVGALEPLLPGPLLAVHPHAGTAPPANQLPWPVLCSPVAGVILLALGALLVLQLIRRRRREHGALWLPPGFTRRPRTQSAPHRRRPPLGEDSIGLKALKPKAEVDEDGVVMCSGPEEGEEVGQAEETGPPSTCQLWSLSGGCGALPQAAMLTPPQESEMEAPDLDTRGPDGVTPLMSAVCCGEVQSGTFQGAWLGCPEPWEPLLDGGACPQAHTVGTGETPLHLAARFSRPTAARRLLEAGANPNQPDRAGRTPLHAAVAADAREVCQLLLRSRQTAVDARTEDGTTPLMLAARLAVEDLVEELIAAQADVGARDKWGKTALHWAAAVNNARAARSLLQAGADKDAQDNREQTPLFLAAREGAVEVAQLLLGLGAARELRDQAGLAPADVAHQRNHWDLLTLLEGAGPPEARHKATPGREAGPFPRARTVSVSVPPHGGGALPRCRTLSAGAGPRGGGACLQARTWSVDLAARGGGAYSHCRSLSGVGAGGGPTPRGRRFSAGMRGPRPNPAIMRGRYGVAAGRGGRVSTDDWPCDWVALGACGSASNIPIPPPCLTPSPERGSPQLDCGPPALQEMPINQGGEGKK

SEQ ID NO: 241 - protein, 930 aa, Homo sapiens
MTGLEDQEFDFEFLFEFNQRDEGAAAAAPEHYGYASSNVSPALPLPTAHSTLPAPCHNLQTSTPGIIPPADHPSGYGAALDGGPAGYFLSSGHTRPDGAPALESPRIEITSCLGLYHNNNQFFHDVEVEDVLPSSKRSPSTATLSLPSLEAYRDPSCLSPASSLSSRSCNSEASSYESNYSYPYASPQTSPWQSPCVSPKTTDPEEGFPRGLGACTLLGSPRHSPSTSPRASVTEESWLGARSSRPASPCNKRKYSLNGRQPPYSPHHSPTPSPHGSPRVSVTDDSWLGNTTQYTSSAIVAAINALTTDSSLDLGDGVPVKSRKTTLEQPPSVALKVEPVGEDLGSPPPPADFAPEDYSSFQHIRKGGFCDQYLAVPQHPYQWAKPKPLSPTSYMSPTLPALDWQLPSHSGPYELRIEVQPKSHHRAHYETEGSRGAVKASAGGHPIVQLHGYLENEPLMLQLFIGTADDRLLRPHAFYQVHRITGKTVSTTSHEAILSNTKVLEIPLLPENSMRAVIDCAGILKLRNSDIELRKGETDIGRKNTRVRLVFRVHVPQPSGRTLSLQVASNPIECSQRSAQELPLVEKQSTDSYPVVGGKKMVLSGHNFLQDSKVIFVEKAPDGHHVWEMEAKTDRDLCKPNSLVVEIPPFRNQRITSPVHVSFYVCNGKRKRSQYQRFTYLPANVPIIKTEPTDDYEPAPTCGPVSQGLSPLPRPYYSQQLAMPPDPSSCLVAGFPPCPQRSTLMPAAPGVSPKLHDLSPAAYTKGVASPGHCHLGLPQPAGEAPAVQDVPRPVATHPGSPGQPPPALLPQQVSAPPSSSCPPGLEHSLCPSSPSPPLPPATQEPTCLQPCSPACPPATGRPQHLPSTVRRDESPTAGPRLLPEVHEDGSPNLAPIPVTVKREPEELDQLYLDDVNEIIRNDLSSTSTHS

SEQ ID NO: 242 - protein, 969 aa, Homo sapiens
MAEDDPYLGRPEQMFHLDPSLTHTIFNPEVFQPQMALPTADGPYLQILEQPKQRGFRFRYVCEGPSHGGLPGASSEKNKKSYPQVKICNYVGPAKVIVQLVTNGKNIHLHAHSLVGKHCEDGICTVTAGPKDMVVGFANLGILHVTKKKVFETLEARMTEACIRGYNPGLLVHPDLAYLQAEGGGDRQLGDREKELIRQAALQQTKEMDLSVVRLMFTAFLPDSTGSFTRRLEPVVSDAIYDSKAPNASNLKIVRMDRTAGCVTGGEEIYLLCDKVQKDDIQIRFYEEEENGGVWEGFGDFSPTDVHRQFAIVFKTPKYKDINITKPASVFVQLRRKSDLETSEPKPFLYYPEIKDKEEVQRKRQKLMPNFSDSFGGGSGAGAGGGGMFGSGGGGGGTGSTGPGYSFPHYGFPTYGGITFHPGTTKSNAGMKHGTMDTESKKDPEGCDKSDDKNTVNLFGKVIETTEQDQEPSEATVGNGEVTLTYATGTKEESAGVQDNLFLEKAMQLAKRHANALFDYAVTGDVKMLLAVQRHLTAVQDENGDSVLHLAIIHLHSQLVRDLLEVTSGLISDDIINMRNDLYQTPLHLAVITKQEDVVEDLLRAGADLSLLDRLGNSVLHLAAKEGHDKVLSILLKHKKAALLLDHPNGDGLNAIHLAMMSNSLPCLLLLVAAGADVNAQEQKSGRTALHLAVEHDNISLAGCLLLEGDAHVDSTTYDGTTPLHIAAGRGSTRLAALLKAAGADPLVENFEPLYDLDDSWENAGEDEGVVPGTTPLDMATSWQVFDILNGKPYEPEFTSDDLLAQGDMKQLAEDVKLQLYKLLEIPDPDKNWATLAQKLGLGILNNAFRLSPAPSKTLMDNYEVSGGTVRELVEALRQMGYTEAIEVIQAASSPVKTTSQAHSLPLSPASTRQQIDELRDSDSVCDSGVETSFRKLSFTESLTSGASLLTLNKMPHDYGQEGPLEGKI

SEQ ID NO: 243 - protein, 900 aa, Homo sapiens
MESCYNPGLDGIIEYDDFKLNSSIVEPKEPAPETADGPYLVIVEQPKQRGFRFRYGCEGPSHGGLPGASSEKGRKTYPTVKICNYEGPAKIEVDLVTHSDPPRAHAHSLVGKQCSELGICAVSVGPKDMTAQFNNLGVLHVTKKNMMGTMIQKLQRQRLRSRPQGLTEAEQRELEQEAKELKKVMDLSIVRLRFSAFLRASDGSFSLPLKPVISQPIHDSKSPGASNLKISRMDKTAGSVRGGDEVYLLCDKVQKDDIEVRFYEDDENGWQAFGDFSPTDVHKQYAIVFRTPPYHKMKIERPVTVFLQLKRKRGGDVSDSKQFTYYPLVEDKEEVQRKRRKALPTFSQPFGGGSHMGGGSGGAAGGYGGAGGGGSLGFFPSSLAYSPYQSGAGPMGCYPGGGGGAQMAATVPSRDSGEEAAEPSAPSRTPQCEPQAPEMLQRAREYNARLFGLAQRSARALLDYGVTADARALLAGQRHLLTAQDENGDTPLHLAIIHGQTSVIEQIVYVIHHAQDLGVVNLTNHLHQTPLHLAVITGQTSVVSFLLRVGADPALLDRHGDSAMHLALRAGAGAPELLRALLQSGAPAVPQLLHMPDFEGLYPVHLAVRARSPECLDLLVDSGAEVEATERQGGRTALHLATEMEELGLVTHLVTKLRANVNARTFAGNTPLHLAAGLGYPTLTRLLLKAGADIHAENEEPLCPLPSPPTSDSDSDSEGPEKDTRSSFRGHTPLDLTCSTKVKTLLLNAAQNTMEPPLTPPSPAGPGLSLGDTALQNLEQLLDGPEAQGSWAELAERLGLRSLVDTYRQTTSPSGSLLRSYELAGGDLAGLLEALSDMGLEEGVRLLRGPETRDKLPSTAEVKEDSAYGSQSVEQEAEKLGPPPEPPGGLCHGHPQPQVH

SEQ ID NO: 244 - protein, 2514 aa, Homo sapiens
MSGSTQPVAQTWRATEPRYPPHSLSYPVQIARTHTDVGLLEYQHHSRDYASHLSPGSIIQPQRRRPSLLSEFQPGNERSQELHLRPESHSYLPELGKSEMEFIESKRPRLELLPDPLLRPSPLLATGQPAGSEDLTKDRSLTGKLEPVSPPSPPHTDPELELVPPRLSKEELIQNMDRVDREITMVEQQISKLKKKQQQLEEEAAKPPEPEKPVSPPPIESKHRSLVQIIYDENRKKAEAAHRILEGLGPQVELPLYNQPSDTRQYHENIKINQAMRKKLILYFKRRNHARKQWEQKFCQRYDQLMEAWEKKVERIENNPRRRAKESKVREYYEKQFPEIRKQRELQERMQSRVGQRGSGLSMSAARSEHEVSEIIDGLSEQENLEKQMRQLAVIPPMLYDADQQRIKFINMNGLMADPMKVYKDRQVMNMWSEQEKETFREKFMQHPKNFGLIASFLERKTVAECVLYYYLTKKNENYKSLVRRSYRRRGKSQQQQQQQQQQQQQQQQQPMPRSSQEEKDEKEKEKEAEKEEEKPEVENDKEDLLKEKTDDTSGEDNDEKEAVASKGRKTANSQGRRKGRITRSMANEANSEEAITPQQSAELASMELNESSRWTEEEMETAKKGLLEHGRNWSAIARMVGSKTVSQCKNFYFNYKKRQNLDEILQQHKLKMEKERNARRKKKKAPAAASEEAAFPPVVEDEEMEASGVSGNEEEMVEEAEALHASGNEVPRGECSGPATVNNSSDTESIPSPHTEAAKDTGQNGPKPPATLGADGPPPGPPTPPPEDIPAPTEPTPASEATGAPTPPPAPPSPSAPPPVVPKEEKEEETAAAPPVEEGEEQKPPAAEELAVDTGKAEEPVKSECTEEAEEGPAKGKDAEAAEATAEGALKAEKKEGGSGRATTAKSSGAPQDSDSSATCSADEVDEAEGGDKNRLLSPRPSLLTPTGDPRANASPQKPLDLKQLKQRAAAIPPIQVTKVHEPPREDAAPTKPAPPAPPPPQNLQPESDAPQQPGSSPRGKSRSPAPPADKEAFAAEAQKLPGDPPCWTSGLPFPVPPREVIKASPHAPDPSAFSYAPPGHPLPLGLHDTARPVLPRPPTISNPPPLISSAKHPSVLERQIGAISQGMSVQLHVPYSEHAKAPVGPVTMGLPLPMDPKKLAPFSGVKQEQLSPRGQAGPPESLGVPTAQEASVLRGTALGSVPGGSITKGIPSTRVPSDSAITYRGSITHGTPADVLYKGTITRIIGEDSPSRLDRGREDSLPKGHVIYEGKKGHVLSYEGGMSVTQCSKEDGRSSSGPPHETAAPKRTYDMMEGRVGRAISSASIEGLMGRAIPPERHSPHHLKEQHHIRGSITQGIPRSYVEAQEDYLRREAKLLKREGTPPPPPPSRDLTEAYKTQALGPLKLKPAHEGLVATVKEAGRSIHEIPREELRHTPELPLAPRPLKEGSITQGTPLKYDTGASTTGSKKHDVRSLIGSPGRTFPPVHPLDVMADARALERACYEESLKSRPGTASSSGGSIARGAPVIVPELGKPRQSPLTYEDHGAPFAGHLPRGSPVTTREPTPRLQEGSLSSSKASQDRKLTSTPREIAKSPHSTVPEHHPHPISPYEHLLRGVSGVDLYRSHIPLAFDPTSIPRGIPLDAAAAYYLPRHLAPNPTYPHLYPPYLIRGYPDTAALENRQTIINDYITSQQMHHNAATAMAQRADMLRGLSPRESSLALNYAAGPRGIIDLSQVPHLPVLVPPTPGTPATAMDRLAYLPTAPQPFSSRHSSSPLSPGGPTHLTKPTTTSSSERERDRDRERDRDREREKSILTSTTTVEHAPIWRPGTEQSSGSSGGGGGSSSRPASHSHAHQHSPISPRTQDALQQRPSVLHNTGMKGIITAVEPSTPTVLRSTSTSSPVRPAATFPPATHCPLGGTLDGVYPTLMEPVLLPKEAPRVARPERPRADTGHAFLAKPPARSGLEPASSPSKGSEPRPLVPPVSGHATIARTPAKNLAPHHASPDPPAPPASASDPHREKTQSKPFSIQELELRSLGYHGSSYSPEGVEPVSPVSSPSLTHDKGLPKHLEELDKSHLEGELRPKQPGPVKLGGEAAHLPHLRPLPESQPSSSPLLQTAPGVKGHQRVVTLAQHISEVITQDYTRHHPQQLSAPLPAPLYSFPGASCPVLDLRRPPSDLYLPPPDHGAPARGSPHSEGGKRSPEPNKTSVLGGGEDGIEPVSPPEGMTEPGHSRSAVYPLLYRDGEQTEPSRMGSKSPGNTSQPPAFFSKLTESNSAMVKSKKQEINKKLNTHNRNEPEYNISQPGTEIFNMPAITGTGLMTYRSQAVQEHASTNMGLEAIIRKALMGKYDQWEESPPLSANAFNPLNASASLPAAMPITAADGRSDHTLTSPGGGGKAKVSGRPSSRKAKSPAPGLASGDRPPSVSSVHSEGDCNRRTPLTNRVWEDRPSSAGSTPFPYNPLIMRLQAGVMASPPPPGLPAGSGPLAGPHHAWDEEPKPLLCSQYETLSDSE

SEQ ID NO: 245 - protein, 598 aa, Homo sapiens
MPCVQAQYGSSPQGASPASQSYSYHSSGEYSSDFLTPEFVKFSMDLTNTEITATTSLPSFSTFMDNYSTGYDVKPPCLYQMPLSGQQSSIKVEDIQMHNYQQHSHLPPQSEEMMPHSGSVYYKPSSPPTPTTPGFQVQHSPMWDDPGSLHNFHQNYVATTHMIEQRKTPVSRLSLFSFKQSPPGTPVSSCQMRFDGPLHVPMNPEPAGSHHVVDGQTFAVPNPIRKPASMGFPGLQIGHASQLLDTQVPSPPSRGSPSNEGLCAVCGDNAACQHYGVRTCEGCKGFFKRTVQKNAKYVCLANKNCPVDKRRRNRCQYCRFQKCLAVGMVKEVVRTDSLKGRRGRLPSKPKSPQEPSPPSPPVSLISALVRAHVDSNPAMTSLDYSRFQANPDYQMSGDDTQHIQQFYDLLTGSMEIIRGWAEKIPGFADLPKADQDLLFESAFLELFVLRLAYRSNPVEGKLIFCNGVVLHRLQCVRGFGEWIDSIVEFSSNLQNMNIDISAFSCIAALAMVTERHGLKEPKRVEELQNKIVNCLKDHVTFNNGGLNRPNYLSKLLGKLPELRTLCTQGLQRIFYLKLEDLVPPPAIIDKLFLDTLPF

SEQ ID NO: 246 - protein, 651 aa, Homo sapiens
MNKLRQSFRRKKDVYVPEASRPHQWQTDEEGVRTGKCSFPVKYLGHVEVDESRGMHICEDAVKRLKAERKFFKGFFGKTGKKAVKAVLWVSADGLRVVDEKTKDLIVDQTIEKVSFCAPDRNFDRAFSYICRDGTTRRWICHCFMAVKDTGERLSHAVGCAFAACLERKQKREKECGVTATFDASRTTFTREGSFRVTTATEQAEREEIMKQMQDAKKAETDKIVVGSSVAPGNTAPSPSSPTSPTSDATTSLEMNNPHAIPRRHAPIEQLARQGSFRGFPALSQKMSPFKRQLSLRINELPSTMQRKTDFPIKNAVPEVEGEAESISSLCSQITNAFSTPEDPFSSAPMTKPVTVVAPQSPTFQANGTDSAFHVLAKPAHTALAPVAMPVRETNPWAHAPDAANKEIAATCSGTEWGQSSGAASPGLFQAGHRRTPSEADRWLEEVSKSVRAQQPQASAAPLQPVLQPPPPTAISQPASPFQGNAFLTSQPVPVGVVPALQPAFVPAQSYPVANGMPYPAPNVPVVGITPSQMVANVFGTAGHPQAAHPHQSPSLVRQQTFPHYEASSATTSPFFKPPAQHLNGSAAFNGVDDGRLASADRHTEVPTGTCPVDPFEAQWAALENKSKQRTNPSPTNPFSSDLQKTFEIEL

SEQ ID NO: 247 - protein, 391 aa, Homo sapiens
MDLEKNYPTPRTSRTGHGGVNQLGGVFVNGRPLPDVVRQRIVELAHQGVRPCDISRQLRVSHGCVSKILGRYYETGSIKPGVIGGSKPKVATPKVVEKIAEYKRQNPTMFAWEIRDRLLAERVCDNDTVPSVSSINRIIRTKVQQPPNQPVPASSHSIVSTGSVTQVSSVSTDSAGSSYSISGILGITSPSADTNKRKRDEGIQESPVPNGHSLPGRDFLRKQMRGDLFTQQQLEVLDRVFERQHYSDIFTTTEPIKPEQTTEYSAMASLAGGLDDMKANLASPTPADIGSSVPGPQSYPIVTGRDLASTTLPGYPPHVPPAGQGSYSAPTLTGMVPGSEFSGSPYSHPQYSSYNDSWRFPNPGLLGSPYYYSAAARGAAPPAAATAYDRH

SEQ ID NO: 248 - protein, 317 aa, Homo sapiens
METNCRKLVSACVQLGVQPAAVECLFSKDSEIKKVEFTDSPESRKEAASSKFFPRQHPGANEKDKSQQGKNEDVGAEDPSKKKRQRRQRTHFTSQQLQELEATFQRNRYPDMSTREEIAVWTNLTEARVRVWFKNRRAKWRKRERNQQAELCKNGFGPQFNGLMQPYDDMYPGYSYNNWAAKGLTSASLSTKSFPFFNSMNVNPLSSQSMFSPPNSISSMSMSSSMVPSAVTGVPGSSLNSLNNLNNLSSPSLNSAVPTPACPYAPPTPPYVYRDTCNSSLASLRLKAKQHSSFGYASVQNPASNLSACQYAVDRPV

SEQ ID NO: 249 - protein, 441 aa, Homo sapiens
MEQPQEEAPEVREEEEKEEVAEAEGAPELNGGPQHALPSSSYTDLSRSSSPPSLLDQLQMGCDGASCGSLNMECRVCGDKASGFHYGVHACEGCKGFFRRTIRMKLEYEKCERSCKIQKKNRNKCQYCRFQKCLALGMSHNAIRFGRMPEAEKRKLVAGLTANEGSQYNPQVADLKAFSKHIYNAYLKNFNMTKKKARSILTGKASHTAPFVIHDIETLWQAEKGLVWKQLVNGLPPYKEISVHVFYRCQCTTVETVRELTEFAKSIPSFSSLFLNDQVTLLKYGVHEAIFAMLASIVNKDGLLVANGSGFVTREFLRSLRKPFSDIIEPKFEFAVKFNALELDDSDLALFIAAIILCGDRPGLMNVPRVEAIQDTILRALEFHLQANHPDAQYLFPKLLQKMADLRQLVTEHAQMMQRIKKTETETSLHPLLQEIYKDMY

SEQ ID NO: 250 - protein, 505 aa, Homo sapiens
MGETLGDSPIDPESDSFTDTLSANISQEMTMVDTEMPFWPTNFGISSVDLSVMEDHSHSFDIKPFTTVDFSSISTPHYEDIPFTRTDPVVADYKYDLKLQEYQSAIKVEPASPPYYSEKTQLYNKPHEEPSNSLMAIECRVCGDKASGFHYGVHACEGCKGFFRRTIRLKLIYDRCDLNCRIHKKSRNKCQYCRFQKCLAVGMSHNAIRFGRMPQAEKEKLLAEISSDIDQLNPESADLRALAKHLYDSYIKSFPLTKAKARAILTGKTTDKSPFVIYDMNSLMMGEDKIKFKHITPLQEQSKEVAIRIFQGCQFRSVEAVQEITEYAKSIPGFVNLDLNDQVTLLKYGVHEIIYTMLASLMNKDGVLISEGQGFMTREFLKSLRKPFGDFMEPKFEFAVKFNALELDDSDLAIFIAVIILSGDRPGLLNVKPIEDIQDNLLQALELQLKLNHPESSQLFAKLLQKMTDLRQIVTEHVQLLQVIKKTETDMSLHPLLQEIYKDLY

SEQ ID NO: 251 - protein, 461 aa, Homo sapiens
MATFSRQEFFQQLLQGCLLPTAQQGLDQIWLLLAICLACRLLWRLGLPSYLKHASTVAGGFFSLYHFFQLHMVWVVLLSLLCYLVLFLCRHSSHRGVFLSVTILIYLLMGEMHMVDTVTWHKMRGAQMIVAMKAVSLGFDLDRGEVGTVPSPVEFMGYLYFVGTIVFGPWISFHSYLQAVQGRPLSCRWLQKVARSLALALLCLVLSTCVGPYLFPYFIPLNGDRLLRNKKRKARGTMVRWLRAYESAVSFHFSNYFVGFLSEATATLAGAGFTEEKDHLEWDLTVSKPLNVELPRSMVEVVTSWNLPMSYWLNNYVFKNALRLGTFSAVLVTYAASALLHGFSFHLAAVLLSLAFITYVEHVLRKRLARILSACVLSKRCPPDCSHQHRLGLGVRALNLLFGALAIFHLAYLGSLFDVDVDDTTEEQGYGMAYTVHKWSELSWASHWVTFGCWIFYRLIG

SEQ ID NO: 252 - protein, 296 aa, Homo sapiens
MAGTWLLLLLALGCPALPTGVGGTPFPSLAPPIMLLVDGKQQMVVVCLVLDVAPPGLDSPIWFSAGNGSALDAFTYGPSPATDGTWTNLAHLSLPSEELASWEPLVCHTGPGAEGHSRSTQPMHLSGEASTARTCPQEPLRGGCGLLRAPERFLLAGTPGGALWLGVLRLLLFKLLLFDLLLTCSCLCDPAGPLPSPATTTRLRALGSHRLHPATETGGREATSSPRPQPRDRRWGDTPPGRKPGSPVWGEGSYLSSYPTCPAQAWCSRSALRAPSSSLGAFFAGDLPPPLQAGAA

SEQ ID NO: 253 - protein, 467 aa, Homo sapiens
MTELPAPLSYFQNAQMSEDNHLSNTVRSQNDNRERQEHNDRRSLGHPEPLSNGRPQGNSRQVVEQDEEEDEELTLKYGAKHVIMLFVPVTLCMVVVVATIKSVSFYTRKDGQLIYTPFTEDTETVGQRALHSILNAAIMISVIVVMTILLVVLYKYRCYKVIHAWLIISSLLLLFFFSFIYLGEVFKTYNVAVDYITVALLIWNFGVVGMISIHWKGPLRLQQAYLIMISALMALVFIKYLPEWTAWLILAVISVYDLVAVLCPKGPLRMLVETAQERNETLFPALIYSSTMVWLVNMAEGDPEAQRRVSKNSKYNAESTERESQDTVAENDDGGFSEEWEAQRDSHLGPHRSTPESRAAVQELSSSILAGEDPEERGVKLGLGDFIFYSVLVGKASATASGDWNTTIACFVAILIGLCLTLLLLAIFKKALPALPISITFGLVFYFATDYLVQPFMDQLAFHQFYI

SEQ ID NO: 254 - protein, 448 aa, Homo sapiens
MLTFMASDSEEEVCDERTSLMSAESPTPRSCQEGRQGPEDGENTAQWRSQENEEDGEEDPDRYVCSGVPGRPPGLEEELTLKYGAKHVIMLFVPVTLCMIVVVATIKSVRFYTEKNGQLIYTPFTEDTPSVGQRLLNSVLNTLIMISVIVVMTIFLVVLYKYRCYKFIHGWLIMSSLMLLFLFTYIYLGEVLKTYNVAMDYPTLLLTVWNFGAVGMVCIHWKGPLVLQQAYLIMISALMALVFIKYLPEWSAWVILGAISVYDLVAVLCPKGPLRMLVETAQERNEPIFPALIYSSAMVWTVGMAKLDPSSQGALQLPYDPEMEEDSYDSFGEPSYPEVFEPPLTGYPGEELEEEEERGVKLGLGDFIFYSVLVGKAAATGSGDWNTTLACFVAILIGLCLTLLLLAVFKKALPALPISITFGLIFYFSTDNLVRPFMDTLASHQLYI

SEQ ID NO: 255 - protein, 101 aa, Homo sapiens
MNLERVSNEEKLNLCRKYYLGGFAFLPFLWLVNIFWFFREAFLVPAYTEQSQIKGYVWRSAVGFLFWVIVLTSWITIFQIYRPRWGALGDYLSFTIPLGTP

SEQ ID NO: 256 - protein, 831 aa, Homo sapiens
MPLEMEPKMSKLAFGCQRSSTSDDDSGCALEEYAWVPPGLRPEQIQLYFACLPEEKVPYVNSPGEKHRIKQLLYQLPPHDNEVRYCQSLSEEEKKELQVFSAQRKKEALGRGTIKLLSRAVMHAVCEQCGLKINGGEVAVFASRAGPGVCWHPSCFVCFTCNELLVDLIYFYQDGKIHCGRHHAELLKPRCSACDEIIFADECTEAEGRHWHMKHFCCLECETVLGGQRYIMKDGRPFCCGCFESLYAEYCETCGEHIGVDHAQMTYDGQHWHATEACFSCAQCKASLLGCPFLPKQGQIYCSKTCSLGEDVHASDSSDSAFQSARSRDSRRSVRMGKSSRSADQCRQSLLLSPALNYKFPGLSGNADDTLSRKLDDLSLSRQGTSFASEEFWKGRVEQETPEDPEEWADHEDYMTQLLLKFGDKSLFQPQPNEMDIRASEHWISDNMVKSKTELKQNNQSLASKKYQSDMYWAQSQDGLGDSAYGSHPGPASSRRLQELELDHGASGYNHDETQWYEDSLECLSDLKPEQSVRDSMDSLALSNITGASVDGENKPRPSLYSLQNFEEMETEDCEKMSNMGTLNSSMLHRSAESLKSLSSELCPEKILPEEKPVHLPVLRRSKSQSRPQQVKFSDDVIDNGNYDIEIRQPPMSERTRRRVYNFEERGSRSHHHRRRRSRKSRSDNALNLVTERKYSPKDRLRLYTPDNYEKFIQNKSAREIQAYIQNADLYGQYAHATSDYGLQNPGMNRFLGLYGEDDDSWCSSSSSSSDSEEEGYFLGQPIPQPRPQRFAYYTDDLSSPPSALPTPQFGQRTTKSKKKKGHKGKNCIIS

SEQ ID NO: 257 - protein, 388 aa, Homo sapiens
MGAAAWARPLSVSFLLLLLPLPGMPAGSWDPAGYLLYCPCMGRFGNQADHFLGSLAFAKLLNRTLAVPPWIEYQHHKPPFTNLHVSYQKYFKLEPLQAYHRVISLEDFMEKLAPTHWPPEKRVAYCFEVAAQRSPDKKTCPMKEGNPFGPFWDQFHVSFNKSELFTGISFSASYREQWSQRFSPKEHPVLALPGAPAQFPVLEEHRPLQKYMVWSDEMVKTGEAQIHAHLVRPYVGIHLRIGSDWKNACAMLKDGTAGSHFMASPQCVGYSRSTAAPLTMTMCLPDLKEIQRAVKLWVRSLDAQSVYVATDSESYVPELQQLFKGKVKVVSLKPEVAQVDLYILGQADHFIGNCVSSFTAFVKRERDLQGRPSSFFGMDRPPKLRDEF

SEQ ID NO: 258 - protein, 419 aa, Homo sapiens
MPAENSPAPAYKVSSHGGDSGLDGLGGPGVQLGSPDKKKRKANTQGPSFPPLSEYAPPPNPNSDHLVAANPFDDNYNTISYKPLPSSNPYLGPGYPGFGGYSTFRMPPHVPPRMSSPYCGPYSLRNQPHPFPQNPLGMGFNRPHAFNFGPHDNSSFGNPSYNNALSQNVNMPNQHFRQNPAENFSQIPPQNASQVSNPDLASNFVPGNNSNFTSPLESNHSFIPPPNTFGQAKAPPPKQDFTQGATKNTNQNSSAHPPHLNMDDTVNQSNIELKNVNRNNAVNQENSRSSSTEATNNNPANGTQNKPRQPRGAADACTTEKSNKSSLHPNRHGHSSSDPVYPCGICTNEVNDDQDAILCEASCQKWFHRICTGMTETAYGLLTAEASAVWGCDTCMADKDVQLMRTRETFGPSAVGSDA

SEQ ID NO: 259 - protein, 193 aa, Homo sapiens
MAAIRKKLVIVGDGACGKTCLLIVFSKDQFPEVYVPTVFENYVADIEVDGKQVELALWDTAGQEDYDRLRPLSYPDTDVILMCFSIDSPDSLENIPEKWTPEVKHFCPNVPIILVGNKKDLRNDEHTRRELAKMKQEPVKPEEGRDMANRIGAFGYMECSAKTKDGVREVFEMATRAALQARRGKKKSGCLVL

SEQ ID NO: 260 - protein, 258 aa, Homo sapiens
MPPQQGDPAFPDRCEAPPVPPRRERGGRGGRGPGEPGGRGRAGGAEGRGVKCVLVGDGAVGKTSLVVSYTTNGYPTEYIPTAFDNFSAVVSVDGRPVRLQLCDTAGQDEFDKLRPLCYTNTDIFLLCFSVVSPSSFQNVSEKWVPEIRCHCPKAPIILVGTQSDLREDVKVLIELDKCKEKPVPEEAAKLCAEEIKAASYIECSALTQKNLKEVFDAAIVAGIQYSDTQQQPKKSKSRTPDKMKNLSKSWWKKYCCFV

SEQ ID NO: 261 - protein, 517 aa, Homo sapiens
MDPAGAADPSVPPNPLTHLSLQDRSEMQLQSEADRRSLPGTWTRSSPEHTTILRGGVRRCLQQQCEQTVRILHAKVAQKSYGNEKRFFCPPPCVYLSGPGWRVKPGQDQAHQAGETGPTVCGYMGLDSASGSATETQKLNFEQQPDSREFGCAKTLYISDADKRKHFRLVLRLVLRGGRELGTFHSRLIKVISKPSQKKQSLKNTDLCISSGSKVSLFNRLRSQTVSTRYLSVEDGAFVASARQWAAFTLHLADGHSAQGDFPPREGYVRYGSLVQLVCTVTGITLPPMIIRKVAKQCALLDVDEPISQLHKCAFQFPGSPPGGGGTYLCLATEKVVQFQASPCPKEANRALLNDSSCWTIIGTESVEFSFSTSLACTLEPVTPVPLISTLELSGGGDVATLELHGENFHAGLKVWFGDVEAETMYRSPRSLVCVVPDVAAFCSDWRWLRAPITIPMSLVRADGLFYPSAFSFTYTPEYSVRPGHPGVPEPATDADALLESIHQEFTRTNFHLFIQT

SEQ ID NO: 262 - protein, 331 aa, Homo sapiens
MSRARGALCRACLALAAALAALLLLPLPLPRAPAPARTPAPAPRAPPSRPAAPSLRPDDVFIAVKTTRKNHGPRLRLLLRTWISRARQQTFIFTDGDDPELELQGGDRVINTNCSAVRTRQALCCKMSVEYDKFIESGRKWFCHVDDDNYVNARSLLHLLSSFSPSQDVYLGRPSLDHPIEATERVQGGRTVTTVKFWFATGGAGFCLSRGLALKMSPWASLGSFMSTAEQVRLPDDCTVGYIVEGLLGARLLHSPLFHSHLENLQRLPPDTLLQQVTLSHGGPENPHNVVNVAGGFSLHQDPTRFKSIHCLLYPDTDWCPRQKQGAPTSR

SEQ ID NO: 263 - protein, 480 aa, Homo sapiens
MASDSIFESFPSYPQCFMRECILGMNPSRDVHDASTSRRFTPPSTALSPGKMSEALPLGAPDAGAALAGKLRSGDRSMVEVLADHPGELVRTDSPNFLCSVLPTHWRCNKTLPIAFKVVALGDVPDGTLVTVMAGNDENYSAELRNATAAMKNQVARFNDLRFVGRSGRGKSFTLTITVFTNPPQVATYHRAIKITVDGPREPRRHRQKLDDQTKPGSLSFSERLSELEQLRRTAMRVSPHHPAPTPNPRASLNHSTAFNPQPQSQMQDTRQIQPSPPWSYDQSYQYLGSIASPSVHPATPISPGRASGMTTLSAELSSRLSTAPDLTAFSDPRQFPALPSISDPRMHYPGAFTYSPTPVTSGIGIGMSAMGSATRYHTYLPPPYPGSSQAQGGPFQASSPSYHLYYGASAGSYQFSMVGGERSPPRILPPCTNASTGSALLNPSLPNQSDVVEAEGSHSNSPTNMAPSARLEEAVWRPY

SEQ ID NO: 264 - protein, 456 aa, Homo sapiens
MKIEEVKSTTKTQRIASHSHVKGLGLDESGLAKQAASGLVGQENAREACGVIVELIKSKKMAGRAVLLAGPPGTGKTALALAIAQELGSKVPFCPMVGSEVYSTEIKKTEVLMENFRRAIGLRIKETKEVYEGEVTELTPCETENPMGGYGKTISHVIIGLKTAKGTKQLKLDPSIFESLQKERVEAGDVIYIEANSGAVKRQGRCDTYATEFDLEAEEYVPLPKGDVHKKKEIIQDVTLHDLDVANARPQGGQDILSMMGQLMKPKKTEITDKLRGEINKVVNKYIDQGIAELVPGVLFVDEVHMLDIECFTYLHRALESSIAPIVIFASNRGNCVIRGTEDITSPHGIPLDLLDRVMIIRTMLYTPQEMKQIIKIRAQTEGINISEEALNHLGEIGTKTTLRYSVQLLTPANLLAKINGKDSIEKEHVEEISELFYDAKSSAKILADQQDKYMK

SEQ ID NO: 265 - protein, 1288 aa, Homo sapiens
MEPIYPFARPQMNTRFPSSRMVPFHFPPSKCALWNPTPTGDFIYLHLSYYRNPKLVVTEKTIRLAYRHAKQNKKNSSCFLLGSLTADEDEEGVTLTVDRFDPGREVPECLEITPTASLPGDFLIPCKVHTQELCSREMIVHSVDDFSSALKALQCHICSKDSLDCGKLLSLRVHITSRESLDSVEFDLHWAAVTLANNFKCTPVKPIPIIPTALARNLSSNLNISQVQGTYKYGYLTMDETRKLLLLLESDPKVYSLPLVGIWLSGITHIYSPQVWACCLRYIFNSSVQERVFSESGNFIIVLYSMTHKEPEFYECFPCDGKIPDFRFQLLTSKETLHLFKNVEPPDKNPIRCELSAESQNAETEFFSKASKNFSIKRSSQKLSSGKMPIHDHDSGVEDEDFSPRPIPSPHPVSQKISKIQPSVPELSLVLDGNFIESNPLPTPLEMVNNENPPLINHLEHLKPLQPQLYDEKHSPEVEAGEPSLRGIPNQLNQDKPALLRHCKVRQPPAYKKGNPHTRNSIKPSSHNGPSHDIFEKLQTVSAGNVQNEEYPIRPSTLNSRQSSLAPQSQPHDFVFSPHNSGRPMELQIPTPPLPSYCSTNVCRCCQHHSHIQYSPLNSWQGANTVGSIQDVQSEALQKHSLFHPSGCPALYCNAFCSSSSPIALRPQGDMGSCSPHSNIEPSPVARPPSHMDLCNPQPCTVCMHTPKTESDNGMMGLSPDAYRFLTEQDRQLRLLQAQIQRLLEAQSLMPCSPKTTAVEDTVQAGRQMELVSVEAQSSPGLHMRKGVSIAVSTGASLFWNAAGEDQEPDSQMKQDDTKISSEDMNFSVDINNEVTSLPGSASSLKAVDIPSFEESNIAVEEEFNQPLSVSNSSSLVVRKEPDVPVFFPSGQLAESVSMCLQTGPTGGASNNSETSEEPKIEHVMQPLLHQPSDNQKIYQDLLGQVNHLLNSSSKETEQPSTKAVIISHECTRTQNVYHTKKKTHHSRLVDKDCVLNATLKQLRSLGVKIDSPTKVKKNAHNVDHASVLACISPEAVISGLNCMSFANVGMSGLSPNGVDLSMEANAIALKYLNENQLSQLSVTRSNQNNCDPFSLLHINTDRSTVGLSLISPNNMSFATKKYMKRYGLLQSSDNSEDEEEPPDNADSKSEYLLNQNLRSIPEQLGGQKEPSKNDHEIINCSNCESVGTNADTPVLRNITNEVLQTKAKQQLTEKPAFLVKNLKPSPAVNLRTGKAEFTQHPEKENEGDITIFPESLQPSETLKQMNSMNSVGTFLDVKRLRQLPKLF

SEQ ID NO: 266 - protein, 314 aa, Homo sapiens
MGIGRSEGGRRGAALGVLLALGAALLAVGSASEYDYVSFQSDIGPYQSGRFYTKPPQCVDIPADLRLCHNVGYKKMVLPNLLEHETMAEVKQQASSWVPLLNKNCHAGTQVFLCSLFAPVCLDRPIYPCRWLCEAVRDSCEPVMQFFGFYWPEMLKCDKFPEGDVCIAMTPPNATEASKPQGTTVCPPCDNELKSEAIIEHLCASEFALRMKIKEVKKENGDKKIVPKKKKPLKLGPIKKKDLKKLVLYLKNGADCPCHQLDNLSHHFLIMGRKVKSQYLLTAIHKWDKKNKEFKNFMKKMKNHECPTFQSVFK

SEQ ID NO: 267 - protein, 346 aa, Homo sapiens
MFLSILVALCLWLHLALGVRGAPCEAVRIPMCRHMPWNITRMPNHLHHSTQENAILAIEQYEELVDVNCSAVLRFFLCAMYAPICTLEFLHDPIKPCKSVCQRARDDCEPLMKMYNHSWPESLACDELPVYDRGVCISPEAIVTDLPEDVKWIDITPDMMVQERPLDVDCKRLSPDRCKCKKVKPTLATYLSKNYSYVIHAKIKAVQRSGCNEVTTVVDVKEIFKSSSPIPRTQVPLITNSSCQCPHILPHQDVLIMCYEWRSRMMLLENCLVEKWRDQLSKRSIQWEERLQEQRRTVQDKKKTAGRTSRSNPPKPKGKPPAPKPASPKKNIKTRSAQKRTNPKRV

SEQ ID NO: 268 - protein, 794 aa, Homo sapiens
MRVRIGLTLLLCAVLLSLASASSDEEGSQDESLDSKTTLTSDESVKDHTTAGRVVAGQIFLDSEESELESSIQEEEDSLKSQEGESVTEDISFLESPNPENKDYEEPKKVRKPALTAIEGTAHGEPCHFPFLFLDKEYDECTSDGREDGRLWCATTYDYKADEKWGFCETEEEAAKRRQMQEAEMMYQTGMKILNGSNKKSQKREAYRYLQKAASMNHTKALERVSYALLFGDYLPQNIQAAREMFEKLTEEGSPKGQTALGFLYASGLGVNSSQAKALVYYTFGALGGNLIAHMVLGYRYWAGIGVLQSCESALTHYRLVANHVASDISLTGGSVVQRIRLPDEVENPGMNSGMLEEDLIQYYQFLAEKGDVQAQVGLGQLHLHGGRGVEQNHQRAFDYFNLAANAGNSHAMAFLGKMYSEGSDIVPQSNETALHYFKKAADMGNPVGQSGLGMAYLYGRGVQVNYDLALKYFQKAAEQGWVDGQLQLGSMYYNGIGVKRDYKQALKYFNLASQGGHILAFYNLAQMHASGTGVMRSCHTAVELFKNVCERGRWSERLMTAYNSYKDGDYNAAVIQYLLLAEQGYEVAQSNAAFILDQREASIVGENETYPRALLHWNRAASQGYTVARIKLGDYHFYGFGTDVDYETAFIHYRLASEQQHSAQAMFNLGYMHEKGLGIKQDIHLAKRFYDMAAEASPDAQVPVFLALCKLGVVYFLQYIRETNIRDMFTQLDMDQLLGPEWDLYLMTIIALLLGTVIAYRQRQHQDMPAPRPPGPRPAPPQQEGPPEQQPPQ

SEQ ID NO: 269 - protein, 128 aa, Homo sapiens
MDAVAVYHGKISRETGEKLLLATGLDGSYLLRDSESVPGVYCLCVLYHGYIYTYRVSQTETGSWSAETAPGVHKRYFRKIKNLISAFQKPDQGIVIPLQYPVEKKSSARSTQGTTGIREDPDVCLKAP

SEQ ID NO: 270 - protein, 847 aa, Homo sapiens
MSLWGLVSKMPPEKVQRLYVDFPQHLRHLLGDWLESQPWEFLVGSDAFCCNLASALLSDTVQHLQASVGEQGEGSTILQHISTLESIYQRDPLKLVATFRQILQGEKKAVMEQFRHLPMPFHWKQEELKFKTGLRRLQHRVGEIHLLREALQKGAEAGQVSLHSLIETPANGTGPSEALAMLLQETTGELEAAKALVLKRIQIWKRQQQLAGNGAPFEESLAPLQERCESLVDIYSQLQQEVGAAGGELEPKTRASLTGRLDEVLRTLVTSCFLVEKQPPQVLKTQTKFQAGVRFLLGLRFLGAPAKPPLVRADMVTEKQARELSVPQGPGAGAESTGEIINNTVPLENSIPGNCCSALFKNLLLKKIKRCERKGTESVTEEKCAVLFSASFTLGPGKLPIQLQALSLPLVVIVHGNQDNNAKATILWDNAFSEMDRVPFVVAERVPWEKMCETLNLKFMAEVGTNRGLLPEHFLFLAQKIFNDNSLSMEAFQHRSVSWSQFNKEILLGRGFTFWQWFDGVLDLTKRCLRSYWSDRLIIGFISKQYVTSLLLNEPDGTFLLRFSDSEIGGITIAHVIRGQDGSPQIENIQPFSAKDLSIRSLGDRIRDLAQLKNLYPKKPKDEAFRSHYKPEQMGKDGRGYVPATIKMTVERDQPLPTPELQMPTMVPSYDLGMAPDSSMSMQLGPDMVPQVYPPHSHSIPPYQGLSPEESVNVLSAFQEPHLQMPPSLGQMSLPFDQPHPQGLLPCQPQEHAVSSPDPLLCSDVTMVEDSCLSQPVTAFPQGTWIGEDIFPPLLPPTEQDLTKLLLEGQGESGGGSLGAQPLLQPSHYGQSGISMSHMDLRANPSW

SEQ ID NO: 271 - protein, 787 aa, Homo sapiens
MAAARPARGPELPLLGLLLLLLLGDPGRGAASSGNATGPGPRSAGGSARRSAAVTGPPPPLSHCGRAAPCEPLRYNVCLGSVLPYGATSTLLAGDSDSQEEAHGKLVLWSGLRNAPRCWAVIQPLLCAVYMPKCENDRVELPSRTLCQATRGPCAIVERERGWPDFLRCTPDRFPEGCTNEVQNIKFNSSGQCEVPLVRTDNPKSWYEDVEGCGIQCQNPLFTEAEHQDMHSYIAAFGAVTGLCTLFTLATFVADWRNSNRYPAVILFYVNACFFVGSIGWLAQFMDGARREIVCRADGTMRLGEPTSNETLSCVIIFVIVYYALMAGVVWFVVLTYAWHTSFKALGTTYQPLSGKTSYFHLLTWSLPFVLTVAILAVAQVDGDSVSGICFVGYKNYRYRAGFVLAPIGLVLIVGGYFLIRGVMTLFSIKSNHPGLLSEKAASKINETMLRLGIFGFLAFGFVLITFSCHFYDFFNQAEWERSFRDYVLCQANVTIGLPTKQPIPDCEIKNRPSLLVEKINLFAMFGTGIAMSTWVWTKATLLIWRRTWCRLTGQSDDEPKRIKKSKMIAKAFSKRHELLQNPGQELSFSMHTVSHDGPVAGLAFDLNEPSADVSSAWAQHVTKMVARRGAILPQDISVTPVATPVPPEEQANLWLVEAEISPELQKRLGRKKKRRKRKKEVCPLAPPPELHPPAPAPSTIPRLPQLPRQKCLVAAGAWGAGDSCRQGAWTLVSNPFCPEPSPPQDPFLPSAPAPVAWAHGRRQGLGPIHSRTNLMDTELMDADSDF

SEQ ID NO: 272 - protein, 536 aa, Homo sapiens
MALTSFLPAPTQLSQDQLEAEEKARSQRSRQTSLVSSRREPPPYGYRKGWIPRLLEDFGDGGAFPEIHVAQYPLDMGRKKKMSNALAIQVDSEGKIKYDAIARQGQSKDKVIYSKYTDLVPKEVMNADDPDLQRPDEEAIKEITEKTRVALEKSVSQKVAAAMPVRAADKLAPAQYIRYTPSQQGVAFNSGAKQRVIRMVEMQKDPMEPPRFKINKKIPRGPPSPPAPVMHSPSRKMTVKEQQEWKIPPCISNWKNAKGYTIPLDKRLAADGRGLQTVHINENFAKLAEALYIADRKAREAVEMRAQVERKMAQKEKEKHEEKLREMAQKARERRAGIKTHVEKEDGEARERDEIRHDRRKERQHDRNLSRAAPDKRSKLQRNENRDISEVIALGVPNPRTSNEVQYDQRLFNQSKGMDSGFAGGEDEIYNVYDQAWRGGKDMAQSIYRPSKNLDKDMYGDDLEARIKTNRFVPDKEFSGSDRRQRGREGPVQFEEDPFGLDKFLEEAKQHGGSKRPSDSSRPKEHEHEGKKRRKE

SEQ ID NO: 273 - protein, 462 aa, Homo sapiens
MLLLARCLLLVLVSSLLVCSGLACGPGRGFGKRRHPKKLTPLAYKQFIPNVAEKTLGASGRYEGKISRNSERFKELTPNYNPDIIFKDEENTGADRLMTQRCKDKLNALAISVMNQWPGVKLRVTEGWDEDGHHSEESLHYEGRAVDITTSDRDRSKYGMLARLAVEAGFDWVYYESKAHIHCSVKAENSVAAKSGGCFPGSATVHLEQGGTKLVKDLSPGDRVLAADDQGRLLYSDFLTFLDRDDGAKKVFYVIETREPRERLLLTAAHLLFVAPHNDSATGEPEASSGSGPPSGGALGPRALFASRVRPGQRVYVVAERDGDRRLLPAAVHSVTLSEEAAGAYAPLTAQGTILINRVLASCYAVIEEHSWAHRAFAPFRLAHALLAALAPARTDRGGDSGGGDRGGGGGRVALTAPGAADAPGAGATAGIHWYSQLLYQIGTWLLDSEALHPLGMAVKSS

SEQ ID NO: 274 - protein, 414 aa, Homo sapiens [sequence omitted]

SEQ ID NO: 275 - protein, 484 aa, Homo sapiens
MAELRPSGAPGPTAPPAPGPTAPPAFASLFPPGLHAIYGECRRLYPDQPNPLQVTAIVKYWLGGPDPLDYVSMYRNVGSPSANIPEHWHYISFGLSDLYGDNRVHEFTGTDGPSGFGFELTFRLKRETGESAPPTWPAELMQGLARYVFQSENTFCSGDHVSWHSPLDNSESRIQHMLLTEDPQMQPVQTPFGVVTFLQIVGVCTEELHSAQQWNGQGILELLRTVPIAGGPWLITDMRRGETIFEIDPHLQERVDKGIETDGSNLSGVSAKCAWDDLSRPPEDDEDSRSICIGTQPRRLSGKDTEQIRETLRRGLEINSKPVLPPINPQRQNGLAHDRAPSRKDSLESDSSTAIIPHELIRTRQLESVHLKFNQESGALIPLCLRGRLLHGRHFTYKSITGDMAITFVSTGVEGAFATEEHPYAAHGPWLQILLTEEFVEKMLEDLEDLTSPEEFKLPKEYSWPEKKLKVSILPDVVFDSPLH

SEQ ID NO: 276 - protein, 384 aa, Homo sapiens
MPQLDSGGGGAGGGDDLGAPDELLAFQDEGEEQDDKSRDSAAGPERDLAELKSSLVNESEGAAGGAGIPGVPGAGAGARGEAEALGREHAAQRLFPDKLPEPLEDGLKAPECTSGMYKETVYSAFNLLMHYPPPSGAGQHPQPQPPLHKANQPPHGVPQLSLYEHFNSPHPTPAPADISQKQVHRPLQTPDLSGFYSLTSGSMGQLPHTVSWFTHPSLMLGSGVPGHPAAIPHPAIVPPSGKQELQPFDRNLKTQAESKAEKEAKKPTIKKPLNAFMLYMKEMRAKVIAECTLKESAAINQILGRRWHALSREEQAKYYELARKERQLHMQLYPGWSARDNYGKKKRRSREKHQESTTGGKRNAFGTYPEKAAAPAPFLPMTVL

SEQ ID NO: 277 - protein, 588 aa, Homo sapiens
MPQLGGGGGGGGGGSGGGGGSSAGAAGGGDDLGANDELIPFQDEGGEEQEPSSDSASAQRDLDEVKSSLVNESENQSSSSDSEAERRPQPVRDTFQKPRDYFAEVRRPQDSAFFKGPPYPGYPFLMIPDLSSPYLSNGPLSPGGARTYLQMKWPLLDVPSSATVKDTRSPSPAHLSNKVPVVQHPHHMHPLTPLITYSNDHFSPGSPPTHLSPEIDPKTGIPRPPHPSELSPYYPLSPGAVGQIPHPLGWLVPQQGQPMYSLPPGGFRHPYPALAMNASMSSLVSSRFSPHMVAPAHPGLPTSGIPHPAIVSPIVKQEPAPPSLSPAVSVKSPVTVKKEEEKKPHVKKPLNAFMLYMKEMRAKVVAECTLKESAAINQILGRKWHNLSREEQAKYYELARKERQLHSQLYPTWSARDNYGKKKKRKREKQLSQTQSQQQVQEAEGALASKSKKPCVQYLPPEKPCDSPASSHGSMLDSPATPSAALASPAAPAATHSEQAQPLSLTTKPETRAQLALHSAAFLSAKAAASSSGQMGSQPPLLSRPLPLGSMPTALLASPPSFPATLHAHQALPVLQAQPLSLVTKSAH

SEQ ID NO: 278 - protein, 770 aa, Homo sapiens
MFPQSRHPTPHQAAGQPFKFTIPESLDRIKEEFQFLQAQYHSLKLECEKLASEKTEMQRHYVMYYEMSYGLNIEMHKQTEIAKRLNTICAQVIPFLSQEHQQQVAQAVERAKQVTMAELNAIIGQQQLQAQHLSHGHGPPVPLTPHPSGLQPPGIPPLGGSAGLLALSSALSGQSHLAIKDDKKHHDAEHHRDREPGTSNSLLVPDSLRGTDKRRNGPEFSNDIKKRKVDDKDSSHYDSDGDKSDDNLVVDVSNEDPSSPRASPAHSPRENGIDKNRLLKKDASSSPASTASSASSTSLKSKEMSLHEKASTPVLKSSTPTPRSDMPTPGTSATPGLRPGLGKPPAIDPLVNQAAAGLRTPLAVPGPYPAPFGMVPHAGMNGELTSPGAAYASLHNMSPQMSAAAAAAAVVAYGRSPMVGFDPPPHMRVPTIPPNLAGIPGGKPAYSFHVTADGQMQPVPFPPDALIGPGIPRHARQINTLNHGEVVCAVTISNPTRHVYTGGKGCVKVWDISHPGNKSPVSQLDCLNRDNYIRSCKLLPDGCTLIVGGEASTLSIWDLAAPTPRIKAELTSSAPACYALAISPDSKVCFSCCSDGNIAVWDLHNQTLVRQFQGHTDGASCIDISNDGTKLWTGGLDNTVRSWDLREGRQLQQHDFTSQIFSLGYCPTGEWLAVGMESSNVEVLHVNKPDKYQLHLHESCVLSLKFAYCGKWFVSTGKDNLLNAWRTPYGASIFQSKESSSVLSCDISVDDKYIVTGSGDKKATVYEVIY

SEQ ID NO: 279 - protein, 521 aa, Homo sapiens
MDTESQYSGYSYKSGHSRSSRKHRDRRDRHRSKSRDGGRGDKSVTIQAPGEPLLDNESTRGDERDDNWGETTTVVTGTSEHSISHDDLTRIAKDMEDSVPLDCSRHLGVAAGATLALLSFLTPLAFLLLPPLLWREELEPCGTACEGLFISVAFKLLILLLGSWALFFRRPKASLPRVFVLRALLMVLVFLLVVSYWLFYGVRILDARERSYQGVVQFAVSLVDALLFVHYLAVVLLELRQLQPQFTLKVVRSTDGASRFYNVGHLSIQRVAVWILEKYYHDFPVYNPALLNLPKSVLAKKVSGFKVYSLGEENSTNNSTGQSRAVIAAAARRRDNSHNEYYYEEAEHERRVRKRRARLVVAVEEAFTHIKRLQEEEQKNPREVMDPREAAQAIFASMARAMQKYLRTTKQQPYHTMESILQHLEFCITHDMTPKAFLERYLAAGPTIQYHKERWLAKQWTLVSEEPVTNGLKDGIVFLLKRQDFSLVVSTKKVPFFKLSEEFVDPKSHKFVMRLQSETSV

SEQ ID NO: 280 - protein, 1255 aa, Homo sapiens [sequence omitted]

SEQ ID NO: 281 - protein, 454 aa, Homo sapiens
MDFFRVVENQQPPATMPLNVSFTNRNYDLDYDSVQPYFYCDEEENFYQQQQQSELQPPAPSEDIWKKFELLPTPPLSPSRRSGLCSPSYVAVTPFSLRGDNDGGGGSFSTADQLEMVTELLGGDMVNQSFICDPDDETFIKNIIIQDCMWSGFSAAAKLVSEKLASYQAARKDSGSPNPARGHSVCSTSSLYLQDLSAAASECIDPSVVFPYPLNDSSSPKSCASQDSSAFSPSSDSLLSSTESSPQGSPEPLVLHEETPPTTSSDSEEEQEDEEEIDVVSVEKRQAPGKRSESGSPSAGGHSKPPHSPLVLKRCHVSTHQHNYAAPPSTRKDYPAAKRVKLDSVRVLRQISNNRKCTSPRSSDTEENVKRRTHNVLERQRRNELKRSFFALRDQIPELENNEKAPKVVILKKATAYILSVQAEEQKLISEEDLLRKRREQLKHKLEQLRNSCA

SEQ ID NO: 282 - protein, 360 aa, Homo sapiens
MNAPLGGIWLWLPLLLTWLTPEVNSSWWYMRATGGSSRVMCDNVPGLVSSQRQLCHRHPDVMRAISQGVAEWTAECQHQFRQHRWNCNTLDRDHSLFGRVLLRSSRESAFVYAISSAGVVFAITRACSQGEVKSCSCDPKKMGSAKDSKGIFDWGGCSDNIDYGIKFARAFVDAKERKGKDARALMNLHNNRAGRKAVKRFLKQECKCHGVSGSCTLRTCWLAMADFRKTGDYLWRKYNGAIQVVMNQDGTGFTVANERFKKPTKNDLVYFENSPDYCIRDREAGSLGTAGRVCNLTSRGMDSCEVMCCGRGYDTSHVTRMTKCGCKFHWCCAVRCQDCLEALDVHTCKAPKNADWTTAT

SEQ ID NO: 283 - protein, 370 aa, Homo sapiens
MGLWALLPGWVSATLLLALAALPAALAANSSGRWWGIVNVASSTNLLTDSKSLQLVLEPSLQLLSRKQRRLIRQNPGILHSVSGGLQSAVRECKWQFRNRRWNCPTAPGPHLFGKIVNRGCRETAFIFAITSAGVTHSVARSCSEGSIESCTCDYRRRGPGGPDWHWGGCSDNIDFGRLFGREFVDSGEKGRDLRFLMNLHNNEAGRTTVFSEMRQECKCHGMSGSCTVRTCWMRLPTLRAVGDVLRDRFDGASRVLYGNRGSNRASRAELLRLEPEDPAHKPPSPHDLVYFEKSPNFCTYSGRLGTAGTAGRACNSSSPALDGCELLCCGRGHRTRTQRVTERCNCTFHWCCHVSCRNCTHTRVLHECL

SEQ ID NO: 284 - protein, 417 aa, Homo sapiens
MGSAHPRPWLRLRPQPQPRPALWVLLFFLLLLAAAMPRSAPNDILDLRLPPEPVLNANTVCLTLPGLSRRQMEVCVRHPDVAASAIQGIQIAIHECQHQFRDQRWNCSSLETRNKIPYESPIFSRGFRESAFAYAIAAAGVVHAVSNACALGKLKACGCDASRRGDEEAFRRKLHRLQLDALQRGKGLSHGVPEHPALPTASPGLQDSWEWGGCSPDMGFGERFSKDFLDSREPHRDIHARMRLHNNRVGRQAVMENMRRKCKCHGTSGSCQLKTCWQVTPEFRTVGALLRSRFHRATLIRPHNRNGGQLEPGPAGAPSPAPGAPGPRRRASPADLVYFEKSPDFCEREPRLDSAGTVGRLCNKSSAGSDGCGSMCCGRGHNILRQTRSERCHCRFHWCCFVVCEECRITEWVSVCK

SEQ ID NO: 285 - protein, 354 aa, Homo sapiens
MRARPQVCEALLFALALQTGVCYGIKWLALSKTPSALALNQTQHCKQLEGLVSAQVQLCRSNLELMHTVVHAAREVMKACRRAFADMRWNCSSIELAPNYLLDLERGTRESAFVYALSAAAISHAIARACTSGDLPGCSCGPVPGEPPGPGNRWGGCADNLSYGLLMGAKFSDAPMKVKKTGSQANKLMRLHNSEVGRQALRASLEMKCKCHGVSGSCSIRTCWKGLQELQDVAADLKTRYLSATKVVHRPMGTRKHLVPKDLDIRPVKDSELVYLQSSPDFCMKNEKVGSHGTQDRQCNKTSNGSDSCDLMCCGRGYNPYTDRVVERCHCKYHWCCYVTCRRCERTVERYVCK

SEQ ID NO: 286 - protein, 365 aa, Homo sapiens
MDRAALLGLARLCALWAALLVLFPYGAQGNWMWLGIASFGVPEKLGCANLPLNSRQKELCKRKPYLLPSIREGARLGIQECGSQFRHERWNCMITAAATTAPMGASPLFGYELSSGTKETAFIYAVMAAGLVHSVTRSCSAGNMTECSCDTTLQNGGSASEGWHWGGCSDDVQYGMWFSRKFLDFPIGNTTGKENKVLLAMNLHNNEAGRQAVAKLMSVDCRCHGVSGSCAVKTCWKTMSSFEKIGHLLKDKYENSIQISDKTKRKMRRREKDQRKIPIHKDDLLYVNKSPNYCVEDKKLGIPGTQGRECNRTSEGADGCNLLCCGRGYNTHVVRHVERCECKFIWCCYVRCRRCESMTDVHTCK

SEQ ID NO: 287 - protein, 391 aa, Homo sapiens
MLRPGGAEEAAQLPLRRASAPVPVPSPAAPDGSRASARLGLACLLLLLLLTLPARVDTSWWYIGALGARVICDNIPGLVSRQRQLCQRYPDIMRSVGEGAREWIRECQHQFRHHRWNCTTLDRDHTVFGRVMLRSSREAAFVYAISSAGVVHAITRACSQGELSVCSCDPYTRGRHHDQRGDFDWGGCSDNIHYGVRFAKAFVDAKEKRLKDARALMNLHNNRCGRTAVRRFLKLECKCHGVSGSCTLRTCWRALSDFRRTGDYLRRRYDGAVQVMATQDGANFTAARQGYRRATRTDLVYFDNSPDYCVLDKAAGSLGTAGRVCSKTSKGTDGCEIMCCGRGYDTTRVTRVTQCECKFHWCCAVRCKECRNTVDVHTCKAPKKAEWLDQT

SEQ ID NO: 288 - protein, 355 aa, Homo sapiens
MEPHLLGLLLGLLLGGTRVLAGYPIWWSLALGQQYTSLGSQPLLCGSIPGLVPKQLRFCRNYIEIMPSVAEGVKLGIQECQHQFRGRRWNCTTIDDSLAIFGPVLDKATRESAFVHAIASAGVAFAVTRSCAEGTSTICGCDSHHKGPPGEGWKWGGCSEDADFGVLVSREFADARENRPDARSAMNKHNNEAGRTTILDHMHLKCKCHGLSGSCEVKTCWWAQPDFRAIGDFLKDKYDSASEMVVEKHRESRGWVETLRAKYSLFKPPTERDLVYYENSPNFCEPNPETGSFGTRDRTCNVTSHGIDGCDLLCCGRGHNTRTEKRKEKCHCIFHWCCYVSCQECIRIYDVHTCK

SEQ ID NO: 289 - protein, 352 aa, Homo sapiens
MAPLGYFLLLCSLKQALGSYPIWWSLAVGPQYSSLGSQPILCASIPGLVPKQLRFCRNYVEIMPSVAEGIKIGIQECQHQFRGRRWNCTTVHDSLAIFGPVLDKATRESAFVHAIASAGVAFAVTRSCAEGTAAICGCSSRHQGSPGKGWKWGGCSEDIEFGGMVSREFADARENRPDARSAMNRHNNEAGRQAIASHMHLKCKCHGLSGSCEVKTCWWSQPDFRAIGDFLKDKYDSASEMVVEKHRESRGWVETLRPRYTYFKVPTERDLVYYEASPNFCEPNPETGSFGTRDRTCNVSSHGIDGCDLLCCGRGHNARAERRREKCRCVFHWCCYVSCQECTRVYDVHTCK

SEQ ID NO: 290 - protein, 351 aa, Homo sapiens
MSPRSCLRSLRLLVFAVFSAAASNWLYLAKLSSVGSISEEETCEKLKGLIQRQVQMCKRNLEVMDSVRRGAQLAIEECQYQFRNRRWNCSTLDSLPVFGKVVTQGTREAAFVYAISSAGVAFAVTRACSSGELEKCGCDRTVHGVSPQGFQWSGCSDNIAYGVAFSQSFVDVRERSKGASSSRALMNLHNNEAGRKAILTHMRVECKCHGVSGSCEVKTCWRAVPPFRQVGHALKEKFDGATEVEPRRVGSSRALVPRNAQFKPHTDEDLVYLEPSPDFCEQDMRSGVLGTRGRTCNKTSKAIDGCELLCCGRGFHTAQVELAERCSCKFHWCCFVKCRQCQRLVELHTCR

SEQ ID NO: 291 - protein, 380 aa, Homo sapiens
MKKSIGILSPGVALGMAGSAMSSKFFLVALAIFFSFAQVVIEANSWWSLGMNNPVQMSEVYIIGAQPLCSQLAGLSQGQKKLCHLYQDHMQYIGEGAKTGIKECQYQFRHRRWNCSTVDNTSVFGRVMQIGSRETAFTYAVSAAGVVNAMSRACREGELSTCGCSRAARPKDLPRDWLWGGCGDNIDYGYRFAKEFVDARERERIHAKGSYESARILMNLHNNEAGRRTVYNLADVACKCHGVSGSCSLKTCWLQLADFRKVGDALKEKYDSAAAMRLNSRGKLVQVNSRFNSPTTQDLVYIDPSPDYCVRNESTGSLGTQGRLCNKTSEGMDGCELMCCGRGYDQFKTVQTERCHCKFHWCCYVKCKKCTEIVDQFVCK

SEQ ID NO: 292 - protein, 359 aa, Homo sapiens
MPSLLLLFTAALLSSWAQLLTDANSWWSLALNPVQRPEMFIIGAQPVCSQLPGLSPGQRKLCQLYQEHMAYIGEGAKTGIKECQHQFRQRRWNCSTADNASVFGRVMQIGSRETAFTHAVSAAGVVNAISRACREGELSTCGCSRTARPKDLPRDWLWGGCGDNVEYGYRFAKEFVDAREREKNFAKGSEEQGRVLMNLQNNEAGRRAVYKMADVACKCHGVSGSCSLKTCWLQLAEFRKVGDRLKEKYDSAAAMRVTRKGRLELVNSRFTQPTPEDLVYVDPSPDYCLRNESTGSLGTQGRLCNKTSEGMDGCELMCCGRGYNQFKSVQVERCHCKFHWCCFVRCKKCTEIVDQYICK

SEQ ID NO: 293 - protein, 365 aa, Homo sapiens
MLPPLPSRLGLLLLLLLCPAHVGGLWWAVGSPLVMDPTSICRKARRLAGRQAELCQAEPEVVAELARGARLGVRECQFQFRFRRWNCSSHSKAFGRILQQDIRETAFVFAITAAGASHAVTQACSMGELLQCGCQAPRGRAPPRPSGLPGTPGPPGPAGSPEGSAAWEWGGCGDDVDFGDEKSRLFMDARHKRGRGDIRALVQLHNNEAGRLAVRSHTRTECKCHGLSGSCALRTCWQKLPPFREVGARLLERFHGASRVMGTNDGKALLPAVRTLKPPGRADLLYAADSPDFCAPNRRTGSPGTRGRACNSSAPDLSGCDLLCCGRGHRQESVQLEENCLCRFHWCCVVQCHRCRVRKELSLCL

SEQ ID NO: 294 - protein, 349 aa, Homo sapiens
MNRKARRCLGHLFLSLGMVYLRIGGFSSVVALGASIICNKIPGLAPRQRAICQSRPDAIIVIGEGSQMGLDECQFQFRNGRWNCSALGERTVFGKELKVGSREAAFTYAIIAAGVAHAITAACTQGNLSDCGCDKEKQGQYHRDEGWKWGGCSADIRYGIGFAKVFVDAREIKQNARTLMNLHNNEAGRKILEENMKLECKCHGVSGSCTTKTCWTTLPQFRELGYVLKDKYNEAVHVEPVRASRNKRPTFLKIKKPLSYRKPMDTDLVYIEKSPNYCEEDPVTGSVGTQGRACNKTAPQASGCDLMCCGRGYNTHQYARVWQCNCKFHWCCYVKCNTCSERTEMYTCK

SEQ ID NO: 295 - protein, 349 aa, Homo sapiens
MHRNFRKWIFYVFLCFGVLYVKLGALSSVVALGANIICNKIPGLAPRQRAICQSRPDAIIVIGEGAQMGINECQYQFRFGRWNCSALGEKTVFGQELRVGSREAAFTYAITAAGVAHAVTAACSQGNLSNCGCDREKQGYYNQAEGWKWGGCSADVRYGIDFSRRFVDAREIKKNARRLMNLHNNEAGRKVLEDRMQLECKCHGVSGSCTTKTCWTTLPKFREVGHLLKEKYNAAVQVEVVRASRLRQPTFLRIKQLRSYQKPMETDLVYIEKSPNYCEEDAATGSVGTQGRLCNRTSPGADGCDTMCCGRGYNTHQYTKVWQCNCKFHWCCFVKCNTCSERTEVFTCK

SEQ ID NO: 296 - protein, 351 aa, Homo sapiens
MGNLFMLWAALGICCAAFSASAWSVNNFLITGPKAYLTYTTSVALGAQSGIEECKFQFAWERWNCPENALQLSTHNRLRSATRETSFIHAISSAGVMYIITKNCSMGDFENCGCDGSNNGKTGGHGWIWGGCSDNVEFGERISKLFVDSLEKGKDARALMNLHNNRAGRLAVRATMKRTCKCHGISGSCSIQTCWLQLAEFREMGDYLKAKYDQALKIEMDKRQLRAGNSAEGHWVPAEAFLPSAEAELIFLEESPDYCTCNSSLGIYGTEGRECLQNSHNTSRWERRSCGRLCTECGLQVEERKTEVISSCNCKFQWCCTVKCDQCRHVVSKYYCARSPGSAQSLGKGSA

SEQ ID NO: 297 - protein, 365 aa, Homo sapiens
MLDGSPLARWLAAAFGLTLLLAALRPSAAYFGLTGSEPLTILPLTLEPEAAAQAHYKACDRLKLERKQRRMCRRDPGVAETLVEAVSMSALECQFQFRFERWNCTLEGRYRASLLKRGFKETAFLYAISSAGLTHALAKACSAGRMERCTCDEAPDLENREAWQWGGCGDNLKYSSKFVKEFLGRRSSKDLRARVDFHNNLVGVKVIKAGVETTCKCHGVSGSCTVRTCWRQLAPFHEVGKHLKHKYETALKVGSTTNEAAGEAGAISPPRGRASGAGGSDPLPRTPELVHLDDSPSFCLAGRFSPGTAGRRCHREKNCESICCGRGHNTQSRVVTRPCQCQVRWCCYVECRQCTQREEVYTCKG

SEQ ID NO: 298 - protein, 379 aa, Homo sapiens
MARRSAFPAAALWLWSILLCLLALRAEAGPPQEESLYLWIDAHQARVLIGFEEDILIVSEGKMAPFTHDFRKAQQRMPAIPVNIHSMNFTWQAAGQAEYFYEFLSLRSLDKGIMADPTVNVPLLGTVPHKASVVQVGFPCLGKQDGVAAFEVDVIVMNSEGNTILQTPQNAIFFKTCQQAECPGGCRNGGFCNERRICECPDGFHGPHCEKALCTPRCMNGGLCVTPGFCICPPGFYGVNCDKANCSTTCFNGGTCFYPGKCICPPGLEGEQCEISKCPQPCRNGGKCIGKSKCKCSKGYQGDLCSKPVCEPGCGAHGTCHEPNKCQCQEGWHGRHCNKRYEASLIHALRPAGAQLRQHTPSLKKAEERRDPPESNYIW

SEQ ID NO: 299 - protein, 367 aa, Homo sapiens
MRWFLPWTLAAVTAAAASTVLATALSPAPTTMDFTPAPLEDTSSRPQFCKWPCECPPSPPRCPLGVSLITDGCECCKMCAQQLGDNCTEAAICDPHRGLYCDYSGDRPRYAIGVCAQVVGVGCVLDGVRYNNGQSFQPNCKYNCTCIDGAVGCTPLCLRVRPPRLWCPHPRRVSIPGHCCEQWVCEDDAKRPRKTAPRDTGAFDAVGEVEAWHRNCIAYTSPWSPCSTSCGLGVSTRISNVNAQCWPEQESRLCNLRPCDVDIHTLIKAGKKCLAVYQPEASMNFTLAGCISTRSYQPKYCGVCMDNRCCIPYKSKTIDVSFQCPDGLGFSRQVLWINACFCNLSCRNPNDIFADLESYPDFSEIAN

SEQ ID NO: 300 - protein, 532 aa, Homo sapiens
MLLDAGPQFPAIGVGSFARHHHHSAAAAAAAAAEMQDRELSLAAAQNGFVDSAAAHMGAFKLNPGAHELSPGQSSAFTSQGPGAYPGSAAAAAAAAALGPHAAHVGSYSGPPFNSTRDFLFRSRGFGDSAPGGGQHGLFGPGAGGLHHAHSDAQGHLLFPGLPEQHGPHGSQNVLNGQMRLGLPGEVFGRSEQYRQVASPRTDPYSAAQLHNQYGPMNMNMGMNMAAAAAHHHHHHHHHPGAFFRYMRQQCIKQELICKWIDPEQLSNPKKSCNKTFSTMHELVTHVSVEHVGGPEQSNHVCFWEECPREGKPFKAKYKLVNHIRVHTGEKPFPCPFPGCGKVFARSENLKIHKRTHTGEKPFQCEFEGCDRRFANSSDRKKHMHVHTSDKPYLCKMCDKSYTHPSSLRKHMKVHESSPQGSESSPAASSGYESSTPPGLVSPSAEPQSSSNLSPAAAAAAAAAAAAAAAVSAVHRGGGSGSGGAGGGSGGGSGSGGGGGGAGGGGGGSSGGGSGTAGGHSGLSSNFNEWYV

SEQ ID NO: 301 - protein, 955 aa, Homo sapiens
MPSLPAPPAPLLLLGLLLLGSRPARGAGPEPPVLPIRSEKEPLPVRGAAGCTFGGKVYALDETWHPDLGEPFGVMRCVLCACEAPQWGRRTRGPGRVSCKNIKPECPTPACGQPRQLPGHCCQTCPQERSSSERQPSGLSFEYPRDPEHRSYSDRGEPGAEERARGDGHTDFVALLTGPRSQAVARARVSLLRSSLRFSISYRRLDRPTRIRFSDSNGSVLFEHPAAPTQDGLVCGVWRAVPRLSLRLLRAEQLHVALVTLTHPSGEVWGPLIRHRALAAETFSAILTLEGPPQQGVGGITLLTLSDTEDSLHFLLLFRGLLEPRSGGLTQVPLRLQILHQGQLLRELQANVSAQEPGFAEVLPNLTVQEMDWLVLGELQMALEWAGRPGLRISGHIAARKSCDVLQSVLCGADALIPVQTGAAGSASLTLLGNGSLIYQVQVVGTSSEVVAMTLETKPQRRDQRTVLCHMAGLQPGGHTAVGICPGLGARGAHMLLQNELFLNVGTKDFPDGELRGHVAALPYCGHSARHDTLPVPLAGALVLPPVKSQAAGHAWLSLDTHCHLHYEVLLAGLGGSEQGTVTAHLLGPPGTPGPRRLLKGFYGSEAQGVVKDLEPELLRHLAKGMASLMITTKGSPRGELRGQVHIANQCEVGGLRLEAAGAEGVRALGAPDTASAAPPVVPGLPALAPAKPGGPGRPRDPNTCFFEGQQRPHGARWAPNYDPLCSLCTCQRRTVICDPVVCPPPSCPHPVQAPDQCCPVCPEKQDVRDLPGLPRSRDPGEGCYFDGDRSWRAAGTRWHPVVPPFGLIKCAVCTCKGGTGEVHCEKVQCPRLACAQPVRVNPTDCCKQCPVGSGAHPQLGDPMQADGPRGCRFAGQWFPESQSWHPSVPPFGEMSCITCRCGAGVPHCERDDCSLPLSCGSGKESRCCSRCTAHRRPAPETRTDPELEKEAEGS

SEQ ID NO: 302 - protein, 232 aa, Homo sapiens
MERCPSLGVTLYALVVVLGLRATPAGGQHYLHIRPAPSDNLPLVDLIEHPDPIFDPKEKDLNETLLRSLLGGHYDPGFMATSPPEDRPGGGGGAAGGAEDLAELDQLLRQRPSGAMPSEIKGLEFSEGLAQGKKQRLSKKLRRKLQMWLWSQTFCPVLYAWNDLGSRFWPRYVKVGSCFSKRSCSVPEGMVCKPSKSVHLTVLRWRCQRRGGQRCGWIPIQYPIISECKCSC

SEQ ID NO: 303 - protein, 184 aa, Homo sapiens
MSRTAYTVGALLLLLGTLLPAAEGKKKGSQGAIPPPDKAQHNDSEQTQSPQQPGSRNRGRGQGRGTAMPGEEVLESSQEALHVTERKYLKRDWCKTQPLKQTIHEEGCNSRTIINRFCYGQCNSFYIPRHIRKEEGSFQSCSFCKPKKFTTMMVTLNCPELQPPTKKKRVTRVKQCRCISIDLD

SEQ ID NO: 304 - protein, 168 aa, Homo sapiens
MFWKLSLSLFLVAVLVKVAEARKNRPAGAIPSPYKDGSSNNSERWQHQIKEVLASSQEALVVTERKYLKSDWCKTQPLRQTVSEEGCRSRTILNRFCYGQCNSFYIPRHVKKEEESFQSCAFCKPQRVTSVLVELECPGLDPPFRLKKIQKVKQCRCMSVNLSDSDKQ

SEQ ID NO: 305 - protein, 213 aa, Homo sapiens
MQLPLALCLVCLLVHTAFRVVEGQGWQAFKNDATEIIPELGEYPEPPPELENNKTMNRAENGGRPPHHPFETKDVSEYSCRELHFTRYVTDGPCRSAKPVTELVCSGQCGPARLLPNAIGRGKWWRPSGPDFRCIPDRYRAQRVQLLCPGGEAPRARKVRLVASCKCKRLTRFHNQSELKDFGTEAARPQKGRKPRPRARSAKANQAELENAY

SEQ ID NO: 306 - protein, 223 aa, Homo sapiens
MKLHYVAVLTLAILMFLTWLPESLSCNKALCASDVSKCLIQELCQCRPGEGNCSCCKECMLCLGALWDECCDCVGMCNPRNYSDTPPTSKSTVEELHEPIPSLFRALTEGDTQLNWNIVSFPVAEELSHHENLVSFLETVNQPHHQNVSVPSNNVHAPYSSDKEHMCTVVYFDDCMSIHQCKISCESMGASKYRWFHNACCECIGPECIDYGSKTVKCMNCMF

SEQ ID NO: 307 - protein, 344 aa, Homo sapiens
MVRARHQPGGLCLLLLLLCQFMEDRSAQAGNCWLRQAKNGRCQVLYKTELSKEECCSTGRLSTSWTEEDVNDNTLFKWMIFNGGAPNCIPCKETCENVDCGPGKKCRMNKKNKPRCVCAPDCSNITWKGPVCGLDGKTYRNECALLKARCKEQPELEVQYQGRCKKTCRDVFCPGSSTCVVDQTNNAYCVTCNRICPEPASSEQYLCGNDGVTYSSACHLRKATCLLGRSIGLAYEGKCIKAKSCEDIQCTGGKKCLWDFKVGRGRCSLCDELCPDSKSDEPVCASDNATYASECAMKEAACSSGVLLEVKHSGSCNSISEDTEEEEEDEDQDYSFPISSILEW

SEQ ID NO: 308 - protein, 308 aa, Homo sapiens
MWKRWLALALALVAVAWVRAEEELRSKSKICANVFCGAGRECAVTEKGEPTCLCIEQCKPHKRPVCGSNGKTYLNHCELHRDACLTGSKIQVDYDGHCKEKKSVSPSASPVVCYQSNRDELRRRIIQWLEAEIIPDGWFSKGSNYSEILDKYFKNFDNGDSRLDSSEFLKFVEQNETAINITTYPDQENNKLLRGLCVDALIELSDENADWKLSFQEFLKCLNPSFNPPEKKCALEDETYADGAETEVDCNRCVCACGNWVCTAMTCDGKNQKGAQTQTEEEMTRYVQELQKHQETAEKTKRVSTKEI

SEQ ID NO: 309 - protein, 263 aa, Homo sapiens
MRPGAPGPLWPLPWGALAWAVGFVSSMGSGNPAPGGVCWLQQGQEATCSLVLQTDVTRAECCASGNIDTAWSNLTHPGNKINLLGFLGLVHCLPCKDSCDGVECGPGKACRMLGGRPRCECAPDCSGLPARLQVCGSDGATYRDECELRAARCRGHPDLSVMYRGRCRKSCEHVVCPRPQSCVVDQTGSAHCVVCRAAPCPVPSSPGQELCGNNNVTYISSCHMRQATCFLGRSIGVRHAGSCAGTPEEPPGGESAEEEENFV

SEQ ID NO: 310 - protein, 842 aa, Homo sapiens
MKPGGFWLHLTLLGASLPAALGWMDPGTSRGPDVGVGESQAEEPRSFEVTRREGLSSHNELLASCGKKFCSRGSRCVLSRKTGEPECQCLEACRPSYVPVCGSDGRFYENHCKLHRAACLLGKRITVIHSKDCFLKGDTCTMAGYARLKNVLLALQTRLQPLQEGDSRQDPASQKRLLVESLFRDLDADGNGHLSSSELAQHVLKKQDLDEDLLGCSPGDLLRFDDYNSDSSLTLREFYMAFQVVQLSLAPEDRVSVTTVTVGLSTVLTCAVHGDLRPPIIWKRNGLTLNFLDLEDINDFGEDDSLYITKVTTIHMGNYTCHASGHEQLFQTHVLQVNVPPVIRVYPESQAQEPGVAASLRCHAEGIPMPRITWLKNGVDVSTQMSKQLSLLANGSELHISSVRYEDTGAYTCIAKNEVGVDEDISSLFIEDSARKTLANILWREEGLSVGNMFYVFSDDGIIVIHPVDCEIQRHLKPTEKIFMSYEEICPQREKNATQPCQWVSAVNVRNRYIYVAQPALSRVLVVDIQAQKVLQSIGVDPLPAKLSYDKSHDQVWVLSWGDVHKSRPSLQVITEASTGQSQHLIRTPFAGVDDFFIPPTNLIINHIRFGFIFNKSDPAVHKVDLETMMPLKTIGLHHHGCVPQAMAHTHLGGYFFIQCRQDSPASAARQLLVDSVTDSVLGPNGDVTGTPHTSPDGRFIVSAAADSPWLHVQEITVRGEIQTLYDLQINSGISDLAFQRSFTESNQYNIYAALHTEPDLLFLELSTGKVGMLKNLKEPPAGPAQPWGGTHRIMRDSGLFGQYLLTPARESLFLINGRQNTLRCEVSGIKGGTTVVWVGEV

SEQ ID NO: 311 - protein, 847 aa, Homo sapiens
MFKCWSVVLVLGFIFLESEGRPTKEGGYGLKSYQPLMRLRHKQEKNQESSRVKGFMIQDGPFGSCENKYCGLGRHCVTSRETGQAECACMDLCKRHYKPVCGSDGEFYENHCEVHRAACLKKQKITIVHNEDCFFKGDKCKTTEYSKMKNMLLDLQNQKYIMQENENPNGDDISRKKLLVDQMFKYFDADSNGLVDINELTQVIKQEELGKDLFDCTLYVLLKYDDFNADKHLALEEFYRAFQVIQLSLPEDQKLSITAATVGQSAVLSCAIQGTLRPPIIWKRNNIILNNLDLEDINDFGDDGSLYITKVTTTHVGNYTCYADGYEQVYQTHIFQVNVPPVIRVYPESQAREPGVTASLRCHAEGIPKPQLGWLKNGIDITPKLSKQLTLQANGSEVHISNVRYEDTGAYTCIAKNEAGVDEDISSLFVEDSARKTLANILWREEGLGIGNMFYVFYEDGIKVIQPIECEFQRHIKPSEKLLGFQDEVCPKAEGDEVQRCVWASAVNVKDKFIYVAQPTLDRVLIVDVQSQKVVQAVSTDPVPVKLHYDKSHDQVWVLSWGTLEKTSPTLQVITLASGNVPHHTIHTQPVGKQFDRVDDFFIPTTTLIITHMRFGFILHKDEAALQKIDLETMSYIKTINLKDYKCVPQSLAYTHLGGYYFIGCKPDSTGAVSPQVMVDGVTDSVIGFNSDVTGTPYVSPDGHYLVSINDVKGLVRVQYITIRGEIQEAFDIYTNLHISDLAFQPSFTEAHQYNIYGSSSTQTDVLFVELSSGKVKMIKSLKEPLKAEEWPWNRKNRQIQDSGLFGQYLMTPSKDSLFILDGRLNKLNCEITEVEKGNTVIWVGDA

SEQ ID NO: 312 - protein, 267 aa, Homo sapiens
MHLLLFQLLVLLPLGKTTRHQDGRQNQSSLSPVLLPRNQRELPTGNHEEAEEKPDLFVAVPHLVATSPAGEGQRQREKMLSRFGRFWKKPEREMHPSRDSDSEPFPPGTQSLIQPIDGMKMEKSPLREEAKKFWHHFMFRKTPASQGVILPIKSHEVHWETCRTVPFSQTITHEGCEKVVVQNNLCFGKCGSVHFPGAAQHSHTSCSHCLPAKFTTMHLPLNCTELSSVIKVVMLVEECQCKVKTEHEDGHILHAGSQDSFIPGVSA

SEQ ID NO: 313 - protein, 206 aa, Homo sapiens
MLPPAIHFYLLPLACILMKSCLAFKNDATEILYSHVVKPVPAHPSSNSTLNQARNGGRHFSNTGLDRNTRVQVGCRELRSTKYISDGQCTSISPLKELVCAGECLPLPVLPNWIGGGYGTKYWSRRSSQEWRCVNDKTRTQRIQLQCQDGSTRTYKITVVTACKCKRYTRQHNESSHNFESMSPAKPVQHHRERKRASKSSKHSMS

SEQ ID NO: 314 - protein, 189 aa, Homo sapiens
MLLGQLSTLLCLLSGALPTGSGRPEPQSPRPQSWAAANQTWALGPGALPPLVPASALGSWKAFLGLQKARQLGMGRLQRGQDEVAAVTLPLNPQEVIQGMCKAVPFVQVFSRPGCSAIRLRNHLCFGHCSSLYIPGSDPTPLVLCNSCMPARKRWAPVVLWCLTGSSASRRRVKISTMLIEGCHCSPKA

SEQ ID NO: 315 - protein, 216 aa, Homo sapiens
MPGNLMSQTSRAVSIWKFPAKLGKTHGHRALEATGMMLRVLVGAVLPAMLLAAPPPINKLALFPDKSAWCEAKNITQIVGHSGCEAKSIQNRACLGQCFSYSVPNTFPQSTESLVHCDSCMPAQSMWEIVTLECPGHEEVPRVDKLVEKILHCSCQACGKEPSHEGLSVYVQGEDGPGSQPGTHPHPHPHPHPGGQTPEPEDPPGAPHTEEEGAED

SEQ ID NO: 316 - protein, 685 aa, Homo sapiens
MLWFSGVGALAERYCRRSPGITCCVLLLLNCSGVPMSLASSFLTGSVAKCENEGEVLQIPFITDNPCIMCVCLNKEVTCKREKCPVLSRDCALAIKQRGACCEQCKGCTYEGNTYNSSFKWQSPAEPCVLRQCQEGVVTESGVRCVVHCKNPLEHLGMCCPTCPGCVFEGVQYQEGEEFQPEGSKCTKCSCTGGRTQCVREVCPILSCPQHLSHIPPGQCCPKCLGQRKVFDLPFGSCLFRSDVYDNGSSFLYDNCTACTCRDSTVVCKRKCSHPGGCDQGQEGCCEECLLRVPPEDIKVCKFGNKIFQDGEMWSSINCTICACVKGRTECRNKQCIPISSCPQGKILNRKGCCPICTEKPGVCTVFGDPHYNTFDGRTFNFQGTCQYVLTKDCSSPASPFQVLVKNDARRTRSFSWTKSVELVLGESRVSLQQHLTVRWNGSRIALPCRAPHFHIDLDGYLLKVTTKAGLEISWDGDSFVEVMAAPHLKGKLCGLCGNYNGHKRDDLIGGDGNFKFDVDDFAESWRVESNEFCNRPQRKPVPELCQGTVKVKLRAHRECQKLKSWEFQTCHSTVDYATFYRSCVTDMCECPVHKNCYCESFLAYTRACQREGIKVHWEPQQNCAATQCKHGAVYDTCGPGCIKTCDNWNEIGPCNKPCVAGCHCPANLVLHKGRCIKPVLCPQR

SEQ ID NO: 317 - protein, 10 aa, Homo sapiens
EQKLISEEDL

SEQ ID NO: 318 - protein, 8 aa, Artificial Sequence
  Description of Artificial Sequence: Synthetic peptide
DYKDDDDK

SEQ ID NO: 319 - protein, 4 aa, Homo sapiens
YRPW
